(19) United States
(12) Patent Application Publication
(10) Pub. No.: US 2014/0004108 A1
(43) Pub. Date: Jan. 2, 2014

(54) Methods for Modulation of Autophagy Through the Modulation of Autophagy-Enhancing Gene Products

(71) Applicant: HARVARD MEDICAL SCHOOL, CAMBRIDGE, MA (US)

(72) Inventors: JUNYING YUAN, NEWTON, MA (US); MARTA M. LIPINSKI, BALTIMORE, MD (US)

(73) Assignee: Harvard Medical School, Cambridge, MA (US)

(21) Appl. No.: 13/929,036

(22) Filed: Jun. 27, 2013

Related U.S. Application Data
(63) Continuation of application No. 13/499,314, filed on Aug. 9, 2012, now abandoned.
(60) Provisional application No. 61/247,251, filed on Sep. 30, 2009.
(60) Provisional application No. 61/247,309, filed on Sep. 30, 2009.

(51) Int. Cl. C12N 5/079

(52) U.S. Cl. CPC C12N 5/0618
USPC 424/133.1; 435/375

(57) ABSTRACT

The present disclosure relates to methods for the modulation of autophagy and the treatment of autophagy-related diseases, including cancer, neurodegenerative diseases and pancreatitis.

### RELATED APPLICATIONS

[0001] This application is a continuation of U.S. patent application Ser. No. 13/499,314, filed Sep. 30, 2010, which is a §371 national stage application based on PCT Application No. PCT/US2010/050968, filed Sep. 30, 2010, which claims the benefit of priority to U.S. Provisional Patent Application No. 61/247,251, filed Sep. 30, 2009 and U.S. Provisional Patent Application No. 61/247,309, filed Sep. 30, 2009 each of which are hereby incorporated by reference in their entirety.

### GOVERNMENT SUPPORT

[0002] This invention was made with U.S. Government support under National Institutes of Health Grant Nos. AG012859 and AG027916. The government has certain rights in the invention.

### BACKGROUND

[0003] Autophagy is a catabolic process that mediates the turnover of intracellular constituents in a lysosome-dependent manner (Levine and Klionsky, (2004) Dev Cell 6, 463-377). Autophagy is initiated by the formation of an isolation membrane, which expands to engulf a portion of the cytoplasm to form a double membrane vesicle called the autophagosome. The autophagosome then fuses with a lysosome to form an autolysosome, where the captured material and the inner membrane are degraded by lysosomal hydrolases. Autophagy is therefore critical for the clearance of large protein complexes and defective organelles, and plays an important role in cellular growth, survival and homeostasis.

[0004] Autophagy has been primarily studied in unicellular eukaryotes, where it is known to be critical for survival of starvation conditions. When a unicellular eukaryote is cultured under conditions of nutrient deprivation, products of autophagic degradation, such as amino acids, fatty acids and nucleotides, can be used by the cell as structural components and as sources of energy (Levine and Klionsky, (2004) Dev Cell 6, 463-377; Levine and Kroemer, (2008), Cell 132, 27-42).

[0005] Cells in complex, multicellular eukaryotes, such as mammals, rarely experience nutrient deprivation under normal physiological conditions. However, when such cells undergo nutrient deprivation or cellular stress, autophagy is often upregulated, which enhances cell survival. Because of their rapid growth and genetic instability, cancer cells are more reliant on autophagy for survival and growth than untransformed cells (Ding et al., (2009), Mol. Cancer. Ther., 8(7), 2036-2045). Additionally, autophagy is frequently activated as a survival mechanism in cancer cells in response to the cellular stress caused by chemotherapeutic agents. Autophagy inhibitors therefore can act as anti-cancer therapeutic agents either alone or in combination with other cancer treatments (Maiuri et al., (2007) Nat. Rev. Cell Biol. 8, 741-752; Amaravadi et al., (2007) J. Clin. Invest. 117, 326-336).

[0006] In addition to its role in responding to cellular stress, autophagy is an important intracellular mechanism for the maintenance of cellular homeostasis through the turnover of malfunctioning, aged or damaged proteins and organelles (Levine and Kroemer, (2008), Cell 132, 27-42). As a result, reduced levels of autophagy contribute to neurodegeneration by increasing the accumulation of misfolded proteins (Hara et al., (2006), Nature, 441, 885-889; Komatsu et al., (2006), Nature, 441, 880-884). Upregulation of autophagy has been demonstrated to reduce both the levels of aggregated proteins and the symptoms of neurodegenerative diseases (Rubinsztein et al., (2007), Nat. Rev. Drug Discov. 6, 304-312). Agents that enhance cellular autophagy therefore can act as therapeutic agents for the prevention or treatment of neurodegenerative diseases.

[0007] In addition to cancer and neurodegeneration, modulation of autophagy is a therapeutic strategy in a wide variety of additional diseases and disorders. For example, several liver diseases, cardiac diseases and muscle diseases are correlated with the accumulation of misfolded protein aggregates. In such diseases, agents that increase cellular autophagy may enhance the clearance of disease-causing aggregates and thereby contribute to treatment and reduce disease severity (Levine and Kroemer, (2008), Cell, 132, 27-42). Additionally, elevated levels of autophagy have also been observed in pancreatic diseases, and have been demonstrated to be an early event in the progression of acute pancreatitis (Fortunato and Kroemer, (2009), Autophagy, 5(6)). Inhibitors of autophagy may, therefore, function as therapeutic agents in the treatment of pancreatitis.

[0008] There is therefore abundant evidence indicating that modulation of autophagy is a useful approach for the treatment of a wide range of diseases and disorders. However, because the genes and pathways responsible for the regulation of mammalian autophagy are poorly understood, there are few validated autophagy regulators that can serve as targets for the development of new therapeutic agents and methods for the treatment of such diseases. Accordingly, there is great need for new methods for the modulation of autophagy and treatment of autophagy-associated diseases.

### SUMMARY

[0009] The present invention provides novel methods for the modulation of autophagy and the treatment of autophagy-related diseases, including cancer, neurodegenerative diseases, liver diseases, muscle diseases and pancreatitis. In order to identify the methods of the present invention, a high-throughput image-based genome-wide screen of a human siRNA library was used to identify 236 autophagy-related genes. These genes were extensively characterized using a combination of high-throughput assays, low-throughput assays and bioinformatics analysis. Based on the results of these studies, biological and pharmaceutical agents useful in the modulation of these genes and their gene products were identified and novel methods for the modulation of autophagy and the treatment of autophagy-related diseases were developed.

[0010] In some embodiments, the invention relates to methods of inducing autophagy in a cell comprising contacting the cell with an agent that inhibits the activity of a product of an autophagy-inhibiting gene of the invention. In certain embodiments, the autophagy-inhibiting gene is selected from the genes listed in Table 1, Table 3, Table 5, Table 7, FIG. 14, FIG. 15, FIG. 39, FIG. 44, and/or FIG. 55. In other embodiments, the autophagy-inhibiting gene is TRPM3, TMPRSS5, IRAK3, ADMR, FGFR1, UNC13B, PTGER2, AGER, BGN, GABBR2, PPARD, GHSR, BAIAIP2, SORCS2, PAQR6, EPHA6, TRHR, C5AR1, BAI3, TLR3, PTPRH, ADRA1A, UTS2R, RORC, CHRND, TACR2, P2RX1, PLXNA2, PTPRU, FCER1A, CD300C, TNFRSF19L CLCF1, LIF, FGF2, SDF1 or IGF. In certain aspects of the invention, the agent is an antibody, a siRNA molecule, a shRNA molecule, and/or an antisense RNA molecule. In other aspects, the agent is TK1258, PF 04494700, PMX53, Tamsulosin, Doxazosin, Prazosin hydrochloride, alfuzosin hydrochloride, Urotensin II, Mecamylamine hydrochloride, ISIS 3521, Gemcitabine, LY900003, MK-5108, U73122 or D609.

[0011] Certain embodiments of the invention relate to methods of inhibiting autophagy in a cell comprising contacting the cell with an agent that inhibits the activity of a product of an autophagy-enhancing gene of the invention. In some embodiments, the autophagy-enhancing gene is selected from the genes listed in Table 2, Table 4 and/or Table 6. In other embodiments, the autophagy enhancing gene is TPR, GPR18, RelA or NFκB. In certain embodiments the agent is an antibody, a siRNA molecule, a shRNA molecule, and/or an antisense RNA molecule.

[0012] In certain aspects, the invention relates to methods of inhibiting autophagy in a cell comprising contacting the cell with an agent that enhances the activity of a product of an autophagy-inhibiting gene of the invention. In some embodiments, the autophagy-inhibiting gene is selected from the genes listed in Table 1, Table 3, Table 5, Table 7, FIG. 14, FIG. 15, FIG. 39, FIG. 44, and/or FIG. 55. In other embodiments, the autophagy-inhibiting gene is TRPM3, TMPRSS5, IRAK3, ADMR, FGFR1, UNC13B, PTGER2, AGER, BGN, GABBR2, PPARD, GHSR, BAIAIP2, SORCS2, PAQR6, EPHA6, TRHR, C5AR1, BAI3, TLR3, PTPRH, ADRA1A, UTS2R, RORC, CHRND, TACR2, P2RX1, PLXNA2, PTPRU, FCER1A, CD300C, TNFRSF19L CLCF1, LIF, FGF2, SDF1 or IGF. In certain embodiments the agent is an antibody. In some embodiments the agent is FGF-1, acidic FGF-1, XRP0038, RhaFGF, GW501516, Ibutamoren Mesylate, KP-102LN, EP1572, TRH, S-0373, Poly-ICR, CQ-07001 or cryptotanshinone. In some embodiments the agent is a growth factor. In other embodiments, the growth factor is CLCF1, LIF, FGF2, SDF1 or IGF1.

[0013] Some embodiments of the invention relate to methods of inducing autophagy in a cell comprising contacting the cell with an agent that enhances the activity of a product of an autophagy-enhancing gene of the invention. In some embodiments, the autophagy-enhancing gene is selected from the genes listed in Table 2, Table 4 and/or Table 6. In other embodiments, the autophagy enhancing gene is TPR, GPR18, RelA or NFκB. In certain embodiments the agent is an antibody.

[0014] In some embodiments, the invention relates to methods of treating a neurodegenerative disease and/or a proteinopathy in a subject comprising administering to the subject an agent that inhibits the activity of a product of an autophagy-inhibiting gene of the invention. In certain embodiments, the autophagy-inhibiting gene is selected from the genes listed in Table 1, Table 3, Table 5, Table 7, FIG. 14, FIG. 15, FIG. 39, FIG. 44, and/or FIG. 55. In other embodiments, the autophagy-inhibiting gene is TRPM3, TMPRSS5, IRAK3, ADMR, FGFR1, UNC13B, PTGER2, AGER, BGN, GABBR2, PPARD, GHSR, BAIAIP2, SORCS2, PAQR6, EPHA6, TRHR, C5AR1, BAI3, TLR3, PTPRH, ADRA1A, UTS2R, RORC, CHRND, TACR2, P2RX1, PLXNA2, PTPRU, FCER1A, CD300C, TNFRSF19L CLCF1, SDF1, LIF, FGF2 or IGF. In some embodiments, the agent is an antibody, a siRNA molecule, a shRNA molecule, and/or an antisense RNA molecule. In other embodiments, the agent is TK1258, PF 04494700, PMX53, Tamsulosin, Doxazosin, Prazosin hydrochloride, alfuzosin hydrochloride, Urotensin II, Mecamylamine hydrochloride, ISIS 3521, Gemcitabine, LY900003, MK-5108, U73122 or D609.

[0015] Some embodiments of the invention relate to methods of treating a neurodegenerative disease and/or a proteinopathy in a subject comprising administering to the subject an agent that enhances the activity of a product of an autophagy-enhancing gene of the invention. In some embodiments, the autophagy-enhancing gene is selected from the genes listed in Table 2, Table 4 and/or Table 6. In other embodiments, the autophagy enhancing gene is TPR, GPR18, RelA or NFκB. In certain embodiments the agent is an antibody.

[0016] In certain embodiments, the neurodegenerative disease is Adrenal Leukodystrophy, alcoholism, Alexander's disease, Alper's disease, Alzheimer's disease, Amyotrophic lateral sclerosis, ataxia telangiectasia, Batten disease, bovine spongiform encephalopathy, Canavan disease, cerebral palsy, cockayne syndrome, corticobasal degeneration, Creutzfeldt-Jakob disease, familial fatal insomnia, frontotemporal lobar degeneration, Huntington's disease, HIV-associated dementia, Kennedy's disease, Krabbe's disease, Lewy body dementia, neuroborreliosis, Machado-Joseph disease, multiple system atrophy, multiple sclerosis, narcolepsy, Niemann Pick disease, Parkinson's disease, Pelizaeus-Merzbacher disease, Pick's disease, primary lateral sclerosis, prion diseases, progressive supranuclear palsy, Refsum's disease, Sandhoff disease, Schilder's disease, subacute combined degeneration of spinal cord secondary to pernicious anaemia, Spielmeyer-Vogt-Sjogren-Batten disease, spinocerebellar ataxia, spinal muscular atrophy, Steele-Richardson-Olszewski disease, Tabes dorsalis, toxic encephalopathy and combinations of these diseases. In some embodiments, the proteinopathy is a 1-antitrypsin deficiency, sporadic inclusion body myositis, limb girdle muscular dystrophy type 2B and Miyoshi myopathy Alzheimer's disease, Parkinson's disease, Lewy Body Dementia, ALS, Huntington's disease, spinocerebellar ataxias, spinobulbar musclular atrophy and combinations of these diseases.

[0017] Certain embodiments of the invention relate to methods of treating cancer or pancreatitis in a subject comprising administering to the subject an agent that inhibits the activity of a product of an autophagy-enhancing gene of the invention. In some embodiments, the autophagy-enhancing gene is selected from the genes listed in Table 2, Table 4 and/or Table 6. In other embodiments, the autophagy enhancing gene is TPR, GPR18, RelA or NFκB. In certain embodiments the agent is an antibody, a siRNA molecule, a shRNA molecule, and/or an antisense RNA molecule.

[0018] In certain aspects, the invention relates to methods of treating cancer or pancreatitis in a subject comprising administering to the subject an agent that enhances the activity of a product of an autophagy-inhibiting gene of the invention. In some embodiments, the autophagy-inhibiting gene is selected from the genes listed in Table 1, Table 3, Table 5, Table 7, FIG. 14, FIG. 15, FIG. 39, FIG. 44, and/or FIG. 55. In other embodiments, the autophagy-inhibiting gene is TRPM3, TMPRSS5, IRAK3, ADMR, FGFR1, UNC13B, PTGER2, AGER, BGN, GABBR2, PPARD, GHSR, BAIAIP2, SORCS2, PAQR6, EPHA6, TRHR, C5AR1, BAI3, TLR3, PTPRH, ADRA1A, UTS2R, RORC, CHRND, TACR2, P2RX1, PLXNA2, PTPRU, FCER1A, CD300C, TNFRSF19L CLCF1, SDF1, LIF, FGF2 or IGF. In certain embodiments the agent is an antibody. In some embodiments the agent is FGF-1, acidic FGF-1, XRP0038, RhaFGF, GW501516, Ibutamoren Mesylate, KP-102LN, EP1572, TRH, S-0373, Poly-ICR, CQ-07001 or cryptotanshinone. In some embodiments the agent is a growth factor. In more specific embodiments, the growth factor is CLCF1, LIF, FGF2, SDF1 or IGF1.

[0019] In some embodiments, the methods of treating cancer further comprise known cancer treatment therapies such as the administration of a chemotherapeutic agent and/or radiation therapy. In certain embodiments the chemotherapeutic agent is altretamine, asparaginase, BCG, bleomycin sulfate, busulfan, camptothecin, carboplatin, carmusine, chlorambucil, cisplatin, claladribine, 2-chlorodeoxyadenosine, cyclophosphamide, cytarabine, dacarbazine imidazole carboxamide, dactinomycin, daunorubicin-dunomycin, dexamethosone, doxurubicin, etoposide, floxuridine, fluorouracil, fluoxymesterone, flutamide, fludarabine, goserelin, hydroxyurea, idarubicin HCL, ifosfamide, interferon α, interferon α 2a, interferon α 2b, interfereon α n3, irinotecan, leucovorin calcium, leuprolide, levamisole, lomustine, megestrol, melphalan, L-sarcosylin, melphalan hydrochloride, MESNA, mechlorethamine, methotrexate, mitomycin, mitoxantrone, mercaptopurine, paclitaxel, plicamycin, prednisone, procarbazine, streptozocin, tamoxifen, 6-thioguanine, thiotepa, topotecan, vinblastine, vincristine or vinorelbine tartrate.

[0020] Other embodiments of the invention relate to methods of determining whether an agent is an autophagy inhibitor comprising the step of contacting a cell with the agent, wherein the cell expresses a heterologous autophagy-enhancing gene of the invention, whereby a reduction in autophagy in the cell indicates that the agent is an autophagy inhibitor. In certain aspects, the agent is a small molecule, an antibody, or an inhibitory RNA molecule.

[0021] Certain embodiments of the invention relate to methods of determining whether an agent is an autophagy inhibitor, the method comprising the step of contacting a cell with the agent, wherein the expression of an autophagy-inhibiting gene of the invention is inhibited in the cell, whereby a reduction in autophagy in the cell indicates that the agent is an autophagy inhibitor. In certain aspects, the agent is a small molecule, an antibody, or an inhibitory RNA molecule. In some embodiments the cell contains a mutation to the autophagy-related gene. In other embodiments the autophagy-related gene is inhibited by an inhibitory RNA or small molecule.

### BRIEF DESCRIPTION OF THE DRAWINGS

[0022] FIG. 1A shows fluorescent microscope images depicting the localization of GFP expressed in H4 cells that stably express LC3-GFP and that were transfected with non-targeting, control siRNA (ntRNA) or siRNA against mTOR or Atg5. FIG. 1B shows the results of a western blot performed using antibodies specific for either LC3 or tubulin and lysates of H4 cells that were transfected with non-targeting, control siRNA (ntRNA) or siRNA against mTOR or Atg5.

[0023] FIG. 2 shows the quantification of the level of autophagosome-associated GFP in H4 cells that stably express LC3-GFP and that were transfected with non-targeting, control siRNA (ntRNA) or siRNA against mTOR or Atg5. The asterisks indicate that the difference between the indicated level and that of the ntRNA transfected cells is statistically significant.

[0024] FIG. 3 shows the gene symbols, Unigene ID numbers, Genbank accession numbers and names of the autophagy-modulating genes of the invention (Figure discloses ‘DEAD’ as SEQ ID NO: 1).

[0025] FIG. 4 shows a schematic diagram depicting a selection of the screens and characterization assays used to identify and characterize the autophagy-modulating genes of the invention.

[0026] FIG. 5 shows the quantification of a series of in-cell-western blot assays that measure mTORC1 activity. The asterisks indicate that the difference between the indicated samples and the ntRNA control samples is statistically significant.

[0027] FIG. 6 shows the gene symbols, Unigene ID numbers, Genbank accession numbers and names of the genes for which the inhibition of their product results in reduced expression of mTORC.

[0028] FIG. 7 shows the gene symbols, Unigene ID numbers, and names of the genes for which the inhibition of their product results in both reduced expression of mTORC and down-regulation of autophagy in the presence of rapamycin.

[0029] FIG. 8A shows fluorescent microscope images depicting the localization of RFP expressed in H4 cells that stably express Lamp1-RFP and that were transfected with non-targeting, control siRNA (ntRNA) or siRNA against mTOR. FIG. 8B shows the quantification of the level of autophagosome-associated RFP in H4 cells that stably express LC3-GFP and that were transfected with non-targeting control siRNA (ntRNA) or siRNA against mTOR or Atg5. The asterisks indicate that the difference between the indicated level and that of the ntRNA transfected cells is statistically significant.

[0030] FIG. 9 shows the gene symbols, Unigene ID numbers, Genbank accession numbers and names of the genes for which the inhibition of their product result in a significant change in the levels of autophagosome-associated Lamp1-RFP in Lamp1-RFP expressing cells (Figure discloses ‘DEAD’ as SEQ ID NO: 1).

[0031] FIG. 10A shows fluorescent microscope images depicting the localization of dsRed expressed in H4 cells that stably express FYVE-dsRed and that were transfected with siRNA against Vprs34 or mTOR. FIG. 10B shows the quantification of the level of autophagosome-associated dsRed in H4 cells that stably express FYVE-dsRed and that were transfected with siRNA against Vprs34 or mTOR. The asterisks indicate that the difference between the indicated level and that of the ntRNA transfected cells is statistically significant. FIG. 10C shows the quantification of the level of autophagosome-associated dsRed in H4 cells that stably express FYVE-dsRed and that were transfected with siRNA against Raptor or mTOR.

[0032] FIG. 11 shows the gene symbols, Unigene ID numbers, Genbank accession numbers and names of the genes for which the inhibition of their product results in a significant change in the levels of PtdIns3P levels (Figure discloses ‘DEAD’ as SEQ ID NO: 1).

[0033] FIG. 12 shows a Venn diagram depicting the subdivision of genes for which the inhibition of their products led to the induction of autophagy into functional categories based on their dependence on type III PI3 kinase activity, lysosomal function and mTORC1 activity.

[0034] FIG. 13 shows the relative average viability of wild-type H4 cells transfected with autophagy-related gene targeting siRNAs (H4) compared to Bcl-2 expressing H4 cells transfected with autophagy-related gene targeting siRNAs (H4+Bcl-2). The asterisks indicate statistical significance.

[0035] FIG. 14 shows the relative viability, gene symbols, Unigene ID numbers, and names of the genes for which the inhibition of their product results in enhancement of autophagy in Bcl-2 expressing cells.

[0036] FIG. 15 shows the relative viability, gene symbols, Unigene ID numbers, and names of the genes for which the inhibition of their product results in enhancement of autophagy wild-type, but not in Bcl-2 expressing cells.

[0037] FIG. 16 shows the quantification of in-cell western assays demonstrating an increase in the levels of GRP78 and GRP94 in H4 cells treated with tunicamycin. The asterisks indicate statistical significance.

[0038] FIG. 17 shows the gene symbols, Unigene ID numbers, and names of the genes for which the inhibition of their product results in enhancement of autophagy and changes in Endoplasmic Reticulum (ER) stress levels (Figure discloses ‘DEAD’ as SEQ ID NO: 1).

[0039] FIG. 18 shows a western blot depicting Bcl-2 expression in H4 LC3-GFP and H4 FYVE-dsRed cells following infection with pBabe-Bcl-2 retrovirus and puromycin selection.

[0040] FIG. 19A shows the quantification of the level of autophagosome-associated GFP in H4 cells that stably express LC3-GFP and Bcl-2 and that were transfected with non-targeting, control siRNA (ntRNA) or siRNA against mTOR. The asterisks indicate that the difference between the indicated level and that of the ntRNA transfected cells is statistically significant. FIG. 19B shows the quantification of the level of autophagosome-associated dsRed in H4 cells that stably express FYVE-dsRed and Bcl-2 and that were transfected with non-targeting, control siRNA (ntRNA) or siRNA against mTOR. The asterisks indicate that the difference between the indicated level and that of the ntRNA transfected cells is statistically significant. FIG. 19C shows the quantification of the level of autophagosome-associated dsRed in H4 cells that stably express FYVE-dsRed and that were transfected with siRNA against autophagy-related gene products that either do not express Bcl-2 (H4) or express Bcl-2 (H4+Bcl-2). The asterisks indicate that the difference between the indicated levels is statistically significant.

[0041] FIG. 20 shows the subdivision of autophagy-related genes for which knock-down was able to induce autophagy under conditions of low PtdIns3P into functional categories based on their ability to up-regulate type III PI3 kinase activity or to alter lysosomal function.

[0042] FIG. 21A shows how selected autophagy-related gene products of the invention are associated with specific protein complexes. FIG. 21B shows how selected autophagy-related gene products of the invention are associated with a network of transcription factors and chromatin modifying enzymes.

[0043] FIG. 22 shows how selected autophagy-related gene products of the invention interact with core autophagic machinery.

[0044] FIG. 23 shows how selected autophagy-related gene products of the invention interact within axon-guidance regulatory pathways.

[0045] FIG. 24 shows how selected autophagy-related gene products of the invention interact within actin-cytoskeleton regulatory pathways.

[0046] FIG. 25A shows the subdivision of the autophagy-related genes of the invention into molecular function categories. FIG. 25B shows the further subdivision of the autophagy-related genes of the invention that are categorized as receptors in FIG. 25A into receptor categories.

[0047] FIG. 26 shows the molecular function categories, gene symbols, Unigene ID numbers and gene names of autophagy-related genes of the invention (Figure discloses ‘DEAD’ as SEQ ID NO: 1).

[0048] FIG. 27A shows the subdivision of the autophagy-related genes of the invention into biological process categories. FIG. 27B shows the further subdivision of the autophagy-related genes of the invention that are categorized as mediators of signal transduction in FIG. 27A into signal transduction categories.

[0049] FIG. 28 shows the quantification of autophagosome associated GFP in H4 LC3-GFP cells grown in the presence of the indicated growth factors (IGF1, FGF2, LIF, CLCF1 and SDF1). The asterisk indicates that the difference between the indicated level and that of the untreated cells is statistically significant.

[0050] FIG. 29 shows fluorescent microscope images depicting the localization of GFP expressed in H4 cells that stably express LC3-GFP and that were either untreated under conditions of nutrient deprivation (untreated), untreated under normal growth conditions (serum), or treated with CLCF1, LIF, FGF2 or IGF1 under conditions of nutrient deprivation (CLCF1, LIF, FGF2 and IGF, respectively).

[0051] FIG. 30 shows that cytokines are able to suppress autophagy in the absence and presence of rapamycin. H4 cells were grown in serum-free medium, followed by addition of 100 ng/mL IGF1 (A), 50 ng/mL FGF2 (B), 50 ng/mL LIF (C) or 50 ng/mL CLCF1 (D) and 10 μg/mL E64d (E). Where indicated, cells were pre-treated with 50 nM rapamycin 1 hour prior to the addition of cytokines. Levels of autophagy were assessed by western blot using antibody against LC3; mTORC1 activity was evaluated with antibodies against phospho-S6 (Ser235/236, P-S6) and phospho-S6 kinase (Thr389, P-S6K). Quantification of LC3 II/tubulin ratio is shown.

[0052] FIG. 31A shows the quantification of autophagosome associated GFP in H4 LC3-GFP cells grown in the presence of 5, 20, 100 or 200 ng/ml of TNFα or the presence of rapamycin. The asterisks indicate that the difference between the indicated level and that of the untreated cells is statistically significant. FIG. 31B shows western blots depicting the levels of p62 in H4 cells that were either untreated under conditions of nutrient deprivation (−), untreated under normal growth conditions (serum), treated with rapamycin (Rap), or treated with 5 ng/ml of TNFα under conditions of nutrient deprivation.

[0053] FIG. 32 shows fluorescent microscope images depicting the localization of GFP expressed in H4 cells that stably express LC3-GFP and that were transfected with non-targeting, control siRNA (ntRNA) or four distinct siRNAs specific for RelA.

[0054] FIG. 33 shows the quantification of the level of autophagosome-associated GFP in H4 cells that stably express LC3-GFP and that were transfected with non-targeting, control siRNA (ntRNA) or four distinct siRNAs specific for RelA. The asterisks indicate that the difference between the indicated level and that of the ntRNA transfected cells is statistically significant.

[0055] FIG. 34A shows the results of semi-quantitative RT-PCR detecting the level of RelA mRNA H4 cells that were transfected with non-targeting, control siRNA (ntRNA) or one of four distinct siRNAs specific for RelA. FIG. 34B shows the results a western blot detecting the level of p65 in H4 cells that were transfected with non-targeting, control siRNA (ntRNA), one of four distinct siRNAs specific for RelA, or a pool of the four RelA specific siRNAs.

[0056] FIG. 35A shows western blots depicting the levels of RelA and LC3 in wild-type H4 cells (wt) and RelA^{-/-} and NFκB^{-/-} double knock-out (DKO) H4 cells. FIG. 35B shows western blots depicting the levels of RelA, p62 and LC3 in H4 cells that have been transfected with siRNAs specific for RelA, non-targeting siRNA (nt), mTor or Atg5.

[0057] FIG. 36A shows FACS histograms depicting the levels of reactive oxygen species in wild-type H4 cells and RelA^{-/-} and NFκB^{-/-} double knock-out (DKO) H4 cells under normal growth conditions (mock) and conditions of nutrient deprivation (starvation). FIG. 36B shows the quantification of the data depicted in FIG. 36A. FIG. 36C shows the quantification of the levels of reactive oxygen species in H4 cells transfected with non-targeting, control siRNA (ntRNA) or siRNAs specific for RelA grown under normal (+serum) or starvation (HBSS) conditions.

[0058] FIG. 37 shows the quantification of the level of autophagosome-associated GFP in H4 cells that stably express LC3-GFP and that were transfected with non-targeting, control siRNA (ntRNA) or siRNAs specific for RelA grown under conditions of nutrient deprivation and either in the presence of antioxidant (NAC) or absence of antioxidant.

[0059] FIG. 38 shows the gene symbols, Unigene ID numbers and prediction basis for the autophagy-related genes of the invention whose products are predicted to be localized to the mitochondria.

[0060] FIG. 39 shows the gene symbols, Unigene ID numbers and names of autophagy-related genes of the invention with known connections to oxidative damage or the regulation of reactive oxygen species.

[0061] FIG. 40A shows western blots depicting the levels of SOD1, p62 and LC3 in H4 cells that were transfected with non-targeting, control siRNA (nt) or siRNA specific for SOD1. FIG. 40B shows fluorescent microscope images depicting the levels of reactive oxygen species in cells transfected with non-targeting, control siRNA (nt) or siRNA specific for SOD1 or treated with 100 mM TBHP. FIG. 40C shows the quantification of the levels of reactive oxygen species in cells transfected with non-targeting, control siRNA (nt) or siRNA specific for SOD1. The asterisks indicate that the difference between the indicated level and that of the ntRNA transfected cells is statistically significant.

[0062] FIG. 41 shows the quantification of the level of autophagosome-associated GFP in H4 cells that stably express LC3-GFP and that were transfected with non-targeting, control siRNA (ntRNA) or siRNA specific for mTOR or SOD1 either in the presence of antioxidant (NAC) or absence of antioxidant (−).

[0063] FIG. 42 shows the gene symbol, Unigene ID number and name of genes for which the inhibition of their product results in enhancement of autophagy in the absence but not in the presence of antioxidant.

[0064] FIG. 43 shows the quantification of the average type III PI3 kinase activity following inhibition of the products of the autophagy-related genes of the invention able (yes) or unable (no) to induce autophagy in the presence of antioxidant (NAC).

[0065] FIG. 44 shows the gene symbol, Unigene ID number and name of genes for which the inhibition of their product results in enhancement of autophagy in the presence of antioxidant.

[0066] FIG. 45 shows an enrichment analysis of canonical pathways (MSigDB) among the hit genes relative to all genes examined in the screen. A p-value<0.05 (hyper geometric distribution) is considered significant. Only categories with at least five genes are displayed (Figure discloses ‘DEAD’ as SEQ ID NO: 1).

[0067] FIG. 46 shows that down-regulation of autophagy by 50 ng/mL FGF2 is prevented by addition of MEK inhibitor UO126. H4 cells were grown in serum-free media, levels of autophagy were assessed in the presence of 10 μg/mL E64d, with antibodies against LC3, inhibition MEK with phospho-ERK 1/2, phospho-RSK and phospho-S6 (Ser235/236). Quantification of LC3 II/tubulin ratio is shown.

[0068] FIG. 47 shows, an enrichment analysis of cis-regulatory elements/transcription factor (TF)-binding sites in the promoters of the hit genes, using motif-based gene sets from MSigDB and TF-binding sites defined in the TRANSFAC database. SRF sites are highlighted.

[0069] FIG. 48 shows a western-blot depicting the phosphorylation of Stat3 following treatment with 50 ng/mL CLCF1.

[0070] FIG. 49 shows that the down-regulation of autophagy by 50 ng/mL LIF is prevented by siRNA mediated knock-down of Stat3. H4 cells were transfected with indicated siRNAs for 72 h, than cells were treated as described for FIG. 46. Protein levels and phosphorylation of Stat3 are shown.

[0071] FIG. 50 shows that suppression of autophagy by 100 ng/mL IGF1 is prevented by Akt inhibitor VIII. Cells were treated as described for FIG. 46. Akt activity was assessed with antibodies against phospho-Foxo3a and phospho-rpS6.

[0072] FIG. 51 shows a clustering analysis of mRNA expression levels of select autophagy hit genes in young (≦40 years-old) or old (≧70 years old) human brain samples.

[0073] FIG. 52 shows a correlation matrix for the data presented in FIG. 45.

[0074] FIG. 53 shows a clustering analysis (dChip) of mRNA expression levels of select autophagy hit genes in young (≦40 years-old) or old (≧70 years old) human brain samples.

[0075] FIG. 54 shows a correlation matrix for autophagy-related genes of the invention with the most significant age-dependent regulation.

[0076] FIG. 55 shows the gene symbol, Unigene ID number, fold change and p value of autophagy-related genes of the invention that are differentially regulated in human brains during aging.

[0077] FIG. 56 shows the expression levels of autophagy-related genes of the invention during aging.

[0078] FIG. 57 shows that differential gene expression leads to up regulation of autophagy in Alzheimer's disease. Forrest plots of Normalized Enrichment Score (NES) estimates with standard deviation for the screen hit gene sets are shown. FIG. 57A shows a GSEA analysis of overall screen hit gene expression in different regions of AD brain as compared to unaffected age-matched controls. FIGS. 57B and 57C show GSEA analysis of hit genes determined to function as negative (B) or positive (C) regulators of autophagy flux. The size of a square is inversely proportional to the respective SD.

[0079] FIG. 58 shows a comparison of the levels of LC3-II accumulation in the presence or absence of 10 nM E64d following treatment of H4 cells with 5 nM Aβ.

[0080] FIG. 59 shows that Aβ induces accumulation of PtdIns3P. FYVE-dsRed cells were prepared as described in FIG. 58, fixed and imaged. Where indicated the type III PI3 kinase inhibitor 3MA (10 mM) was added for 8 hours prior to fixation.

[0081] FIG. 60 shows that the induction of the type III PI3 kinase activity by Aβ is suppressed in the presence of antioxidant. Cells were prepared as described in FIG. 59 and treated with or without antioxidant NAC.

[0082] FIG. 61 shows that the induction of autophagy by Aβ is dependent on the type III PI3 kinase activity. H4 GFP-LC3 cells were treated and imaged as described for FIG. 59.

[0083] FIG. 62 shows that the induction of autophagy by Aβ is dependent on the type III PI3 kinase activity. H4 cells were transfected with siRNA against the type III PI3 kinase subunit Vps34 or non-targeting control siRNA and than treated as described in FIG. 59. Autophagy and lysosomal changes were determined using antibodies against LC3 and Lamp 2, respectively.

[0084] FIG. 63 shows the chemical structures of select small molecule agents that modulate activity of autophagy-related genes of the invention.

[0085] FIG. 64 shows the Genbank accession numbers, names, gene symbols and mRNA sequences of the autophagy-related genes of the invention (SEQ ID NOS 11-246, respectively, in order of appearance).

### DETAILED DESCRIPTION

[0086] Autophagy is a lysosome-dependent catabolic process that mediates turnover of cellular components and protects multicellular eukaryotes from a wide range of diseases. In order to develop new methods for the modulation of autophagy and the treatment of autophagy-related diseases, a high-throughput image-based genome-wide screen of a human siRNA library was performed to identify genes involved in autophagy modulation and regulation. This screen led to the identification of 236 autophagy-related genes that, when knocked-down, led to either an increase or a decrease in levels of autophagy under normal nutrient conditions. The autophagy-related genes of the invention are listed in FIG. 3. These genes were extensively characterized using a combination of high-throughput assays, low-throughput assays and bioinformatics analysis. Based on the results of these studies, biological and pharmaceutical agents useful in the modulation of these genes and their gene products were identified and novel methods for the modulation of autophagy and the treatment of autophagy-related diseases were identified. The present invention, therefore, provides novel methods for the modulation of autophagy and the treatment of autophagy-related diseases, including cancer, neurodegenerative diseases, liver diseases, muscle diseases and pancreatitis.

### 1. DEFINITIONS

[0087] In order for the present invention to be more readily understood, certain terms and phrases are defined below and throughout the specification.

[0088] The articles “a” and “an” are used herein to refer to one or to more than one (i.e., to at least one) of the grammatical object of the article. By way of example, “an element” means one element or more than one element.

[0089] As used herein, the term “administering” means providing a pharmaceutical agent or composition to a subject, and includes, but is not limited to, administering by a medical professional and self-administering.

[0090] As used herein, the term “agent” refers to an entity capable of having a desired biological effect on a subject or cell. A variety of therapeutic agents is known in the art and may be identified by their effects. Examples of therapeutic agents of biological origin include growth factors, hormones, and cytokines. A variety of therapeutic agents is known in the art and may be identified by their effects. Examples include small molecules (e.g., drugs), antibodies, peptides, proteins (e.g., cytokines, hormones, soluble receptors and nonspecific-proteins), oligonucleotides (e.g., peptide-coding DNA and RNA, double-stranded RNA and antisense RNA) and peptidomimetics.

[0091] As used herein, the term “antibody” includes full-length antibodies and any antigen binding fragment (i.e., “antigen-binding portion”) or single chain thereof. The term “antibody” includes, but is not limited to, a glycoprotein comprising at least two heavy (H) chains and two light (L) chains inter-connected by disulfide bonds, or an antigen binding portion thereof. Antibodies may be polyclonal or monoclonal; xenogeneic, allogeneic, or syngeneic; or modified forms thereof (e.g., humanized, chimeric).

[0092] As used herein, the phrase “antigen-binding portion” of an antibody, refers to one or more fragments of an antibody that retain the ability to specifically bind to an antigen. The antigen-binding function of an antibody can be performed by fragments of a full-length antibody. Examples of binding fragments encompassed within the term “antigen-binding portion” of an antibody include (i) a Fab fragment, a monovalent fragment consisting of the V_{H}, V_{L}, CL and CH1 domains; (ii) a F(ab′)₂ fragment, a bivalent fragment comprising two Fab fragments linked by a disulfide bridge at the hinge region; (iii) a Fd fragment consisting of the V_{H} and CH1 domains; (iv) a Fv fragment consisting of the V_{H} and V_{L} domains of a single arm of an antibody, (v) a dAb fragment (Ward et al., (1989) Nature 341:544 546), which consists of a V_{H} domain; and (vi) an isolated complementarity determining region (CDR) or (vii) a combination of two or more isolated CDRs which may optionally be joined by a synthetic linker. Furthermore, although the two domains of the Fv fragment, V_{H} and V_{L}, are coded for by separate genes, they can be joined, using recombinant methods, by a synthetic linker that enables them to be made as a single protein chain in which the V_{H} and V_{L} regions pair to form monovalent molecules (known as single chain Fv (scFv); see e.g., Bird et al. (1988) Science 242:423 426; and Huston et al. (1988) Proc. Natl. Acad. Sci. USA 85:5879 5883). Such single chain antibodies are also intended to be encompassed within the term “antigen-binding portion” of an antibody. These antibody fragments are obtained using conventional techniques known to those with skill in the art, and the fragments are screened for utility in the same manner as are intact antibodies.

[0093] As used herein, the term “cancer” includes, but is not limited to, solid tumors and blood borne tumors. The term cancer includes diseases of the skin, tissues, organs, bone, cartilage, blood and vessels. The term “cancer” further encompasses both primary and metastatic cancers.

[0094] As used herein, the phrases “gene product” and “product of a gene” refers to a substance encoded by a gene and able to be produced, either directly or indirectly, through the transcription of the gene. The phrases “gene product” and “product of a gene” include RNA gene products (e.g. mRNA), DNA gene products (e.g. cDNA) and polypeptide gene products (e.g. proteins).

[0095] As used herein, the phrase “enhancing the activity” of a gene product refers to an increase in a particular activity associated with the gene product. Examples of enhanced activity include, but are not limited to, increased translation of mRNA, increased signal transduction by polypeptides or proteins and increased catalysis by enzymes. Enhancement of activity can occur, for example, through an increased amount of activity performed by individual gene products, through an increase number of gene products performing the activity, or a through any combination thereof. If a gene product enhances a biological process (e.g. autophagy), “enhancing the activity” of such a gene product will generally enhance the process. Conversely, if a gene product functions as an inhibitor of a biological process, “enhancing the activity” of such a gene product will generally inhibit the process.

[0096] As used herein, the phrase “inhibiting the activity” of a gene product refers to a decrease in a particular activity associated with the gene product. Examples of inhibited activity include, but are not limited to, decreased translation of mRNA, decreased signal transduction by polypeptides or proteins and decreased catalysis by enzymes. Inhibition of activity can occur, for example, through a reduced amount of activity performed by individual gene products, through a decreased number of gene products performing the activity, or a through any combination thereof. If a gene product enhances a biological process (e.g. autophagy), “inhibiting the activity” of such a gene product will generally inhibit the process. Conversely, if a gene product functions as an inhibitor of a biological process, “inhibiting the activity” of such a gene product will generally enhance the process.

[0097] As used herein, the term “isolated” refers to the state in which substances (e.g., polypeptides or polynucleotides) are free or substantially free of material with which they are naturally associated such as other polypeptides or polynucleotides with which they are found in their natural environment or the environment in which they are prepared (e.g., cell culture). Polypeptides or polynucleotides can be formulated with diluents or adjuvants and still be considered “isolated”—for example, polypeptides or polynucleotides can be mixed with pharmaceutically acceptable carriers or diluents when used in diagnosis or therapy.

[0098] As used herein, the term “modulation” refers to up regulation (i.e., activation or stimulation), down regulation (i e, inhibition or suppression) of a biological activity, or the two in combination or apart.

[0099] As used herein, the phrases “neurodegenerative disorder” and “neurodegenerative disease” refers to a wide range of diseases and/or disorders of the central and peripheral nervous system, such as neuropathologies, and includes but is not limited to, Parkinson's disease, Alzheimer's disease (AD), amyotrophic lateral sclerosis (ALS), denervation atrophy, otosclerosis, stroke, dementia, multiple sclerosis, Huntington's disease, encephalopathy associated with acquired immunodeficiency disease (AIDS), and other diseases associated with neuronal cell toxicity and cell death.

[0100] As used herein, the phrase “pharmaceutically acceptable” refers to those agents, compounds, materials, compositions, and/or dosage forms which are, within the scope of sound medical judgment, suitable for use in contact with the tissues of human beings and animals without excessive toxicity, irritation, allergic response, or other problem or complication, commensurate with a reasonable benefit/risk ratio.

[0101] As used herein, the phrase “pharmaceutically-acceptable carrier” means a pharmaceutically-acceptable material, composition or vehicle, such as a liquid or solid filler, diluent, excipient, or solvent encapsulating material, involved in carrying or transporting an agent from one organ, or portion of the body, to another organ, or portion of the body. Each carrier must be “acceptable” in the sense of being compatible with the other ingredients of the formulation and not injurious to the patient. Some examples of materials which can serve as pharmaceutically-acceptable carriers include: (1) sugars, such as lactose, glucose and sucrose; (2) starches, such as corn starch and potato starch; (3) cellulose, and its derivatives, such as sodium carboxymethyl cellulose, ethyl cellulose and cellulose acetate; (4) powdered tragacanth; (5) malt; (6) gelatin; (7) talc; (8) excipients, such as cocoa butter and suppository waxes; (9) oils, such as peanut oil, cottonseed oil, safflower oil, sesame oil, olive oil, corn oil and soybean oil; (10) glycols, such as propylene glycol; (11) polyols, such as glycerin, sorbitol, mannitol and polyethylene glycol; (12) esters, such as ethyl oleate and ethyl laurate; (13) agar; (14) buffering agents, such as magnesium hydroxide and aluminum hydroxide; (15) alginic acid; (16) pyrogen-free water; (17) isotonic saline; (18) Ringer's solution; (19) ethyl alcohol; (20) pH buffered solutions; (21) polyesters, polycarbonates and/or polyanhydrides; and (22) other non-toxic compatible substances employed in pharmaceutical formulations.

[0102] As used herein, the phrase “pharmaceutically-acceptable salts” refers to the relatively non-toxic, inorganic and organic salts of compounds.

[0103] As used herein, the term “subject” means a human or non-human animal selected for treatment or therapy.

[0104] As used herein, the phrase “subject suspected of having” means a subject exhibiting one or more clinical indicators of a disease or condition. In certain embodiments, the disease or condition is cancer, a neurodegenerative disorder or pancreatitis.

[0105] As used herein, the phrase “subject in need thereof” means a subject identified as in need of a therapy or treatment of the invention.

[0106] As used herein, the phrase “therapeutic effect” refers to a local or systemic effect in animals, particularly mammals, and more particularly humans, caused by an agent. The phrases “therapeutically-effective amount” and “effective amount” mean the amount of an agent that produces some desired effect in at least a sub-population of cells. A therapeutically effective amount includes an amount of an agent that produces some desired local or systemic effect at a reasonable benefit/risk ratio applicable to any treatment. For example, certain agents used in the methods of the present invention may be administered in a sufficient amount to produce a reasonable benefit/risk ratio applicable to such treatment.

[0107] As used herein, the term “treating” a disease in a subject or “treating” a subject having or suspected of having a disease refers to subjecting the subject to a pharmaceutical treatment, e.g., the administration of an agent, such that at least one symptom of the disease is decreased or prevented from worsening.

### 2. AUTOPHAGY-RELATED GENES

[0108] The autophagy-related genes of the present invention can be divided into genes whose products inhibit autophagy (or autophagy-inhibiting genes, listed in Table 1) and genes whose products enhance autophagy (or autophagy-enhancing genes, listed in Table 2).

[0109] Agents that modulate the activity of products of autophagy-inhibiting genes are useful in the treatment of autophagy-related diseases. Agents that inhibit the activity of the products of autophagy-inhibiting genes result in elevated autophagy levels and are therefore useful in methods of enhancing autophagy and the treatment of autophagy-related diseases that are responsive to elevated levels of autophagy, such as neurodegenerative diseases and proteinopathies. On the other hand, agents that enhance the activity of products of autophagy-inhibiting genes result in reduced autophagy levels, and are therefore useful in methods of inhibition of autophagy and the treatment of autophagy-related diseases that are responsive to autophagy inhibition, such as cancer and pancreatitis.

TABLE 1
Autophagy-inhibiting genes.

| Gene | | | |
|---|---|---|---|
| Symbol | Gene ID | Genbank Acc. No. | Gene Name |
| GHSR | 2693 | NM_004122 | growth hormone secretagogue receptor |
| TINP1 | 10412 | NM_014886 | TGF beta-inducible nuclear protein 1 |
| CHAF1B | 8208 | NM_005441 | chromatin assembly factor 1, subunit B (p60) |
| COX5A | 9377 | NM_004255 | cytochrome c oxidase subunit Va |
| IHPK3 | 117283 | NM_054111 | inositol hexaphosphate kinase 3 |
| CENPE | 1062 | NM_001813 | centromere protein E, 312 kDa |
| CLCF1 | 23529 | NM_013246 | cardiotrophin-like cytokine factor 1 |
| XPO1 | 7514 | NM_003400 | exportin 1 (CRM1 homolog, yeast) |
| KIAA0133 | 9816 | XM_375851 | KIAA0133 |
| ADMR | 11318 | NM_007264 | adrenomedullin receptor |
| OGDH | 4967 | NM_002541 | oxoglutarate (alpha-ketoglutarate) dehydrogenase |
| | | | (lipoamide) |
| DDX24 | 57062 | NM_020414 | DEAD (Asp-Glu-Ala-Asp, SEQ ID NO: 1) box |
| | | | polypeptide 24 |
| NUPR1 | 26471 | NM_012385 | nuclear protein 1 |
| FXYD2 | 486 | NM_001680 | FXYD domain containing ion transport regulator 2 |
| TRHR | 7201 | NM_003301 | thyrotropin-releasing hormone receptor |
| SUV39H1 | 6839 | NM_003173 | suppressor of variegation 3-9 homolog 1 |
| | | | (Drosophila) |
| FCER1A | 2205 | NM_002001 | Fc fragment of IgE, high affinity I, receptor for; alpha |
| | | | polypeptide |
| PTPRU | 10076 | NM_005704 | protein tyrosine phosphatase, receptor type, U |
| GPX2 | 2877 | NM_002083 | glutathione peroxidase 2 (gastrointestinal) |
| PRKCA | 5578 | NM_002737 | protein kinase C, alpha |
| EP300 | 2033 | NM_001429 | E1A binding protein p300 |
| LOC388959 | 388959 | XM_373989 | hypothetical LOC388959 |
| NTN2L | 4917 | NM_006181 | netrin 2-like (chicken) |
| DOCK8 | 81704 | NM_203447 | dedicator of cytokinesis 8 |
| MAP3K7IP1 | 10454 | NM_006116 | mitogen-activated protein kinase kinase kinase 7 |
| | | | interacting protein 1 |
| PLAGL2 | 5326 | NM_002657 | pleiomorphic adenoma gene-like 2 |
| NUDT1 | 4521 | NM_002452 | nudix (nucleoside diphosphate linked moiety X)- |
| | | | type motif 1 |
| RELN | 5649 | NM_005045 | reelin |
| PNKD | 25953 | NM_015488 | paroxysmal nonkinesiogenic dyskinesia |
| RIPK1 | 8737 | NM_003804 | receptor (TNFRSF)-interacting serine-threonine |
| | | | kinase 1 |
| GNG5 | 2787 | NM_005274 | guanine nucleotide binding protein (G protein), |
| | | | gamma 5 |
| CHKA | 1119 | NM_001277 | choline kinase alpha |
| C5AR1 | 728 | NM_001736 | complement component 5a receptor 1 |
| SCOTIN | 51246 | NM_016479 | scotin |
| PIGY | 84992 | NM_032906 | phosphatidylinositol glycan anchor biosynthesis, |
| | | | class Y |
| NAGK | 55577 | NM_017567 | N-acetylglucosamine kinase |
| RAGE | 5891 | NM_014226 | renal tumor antigen |
| USP24 | 23358 | XM_165973 | ubiquitin specific peptidase 24 |
| AURKA | 6790 | NM_003600 | aurora kinase A |
| PLDN | 26258 | NM_012388 | pallidin homolog (mouse) |
| TLR3 | 7098 | NM_003265 | toll-like receptor 3 |
| PPARD | 5467 | NM_006238 | peroxisome proliferator-activated receptor delta |
| HRC | 3270 | NM_002152 | histidine rich calcium binding protein |
| NNMT | 4837 | NM_006169 | nicotinamide N-methyltransferase |
| COPB2 | 9276 | NM_004766 | coatomer protein complex, subunit beta 2 (beta |
| | | | prime) |
| CDK5RAP3 | 80279 | NM_025197 | CDK5 regulatory subunit associated protein 3 |
| NLK | 51701 | NM_016231 | nemo-like kinase |
| PFKL | 5211 | NM_002626 | phosphofructokinase, liver |
| RNPEPL1 | 57140 | NM_018226 | arginyl aminopeptidase (aminopeptidase B)-like 1 |
| EPHA6 | 203806 | XM_114973 | EPH receptor A6 |
| CDCA8 | 55143 | NM_018101 | cell division cycle associated 8 |
| CKAP5 | 9793 | NM_014756 | cytoskeleton associated protein 5 |
| ZBTB16 | 7704 | NM_006006 | zinc finger and BTB domain containing 16 |
| GABBR2 | 9568 | NM_005458 | gamma-aminobutyric acid (GABA) B receptor, 2 |
| PTMA | 5757 | NM_002823 | prothymosin, alpha (gene sequence 28) |
| PTCRA | 171558 | NM_138296 | pre T-cell antigen receptor alpha |
| RORC | 6097 | NM_005060 | RAR-related orphan receptor C |
| GNAI1 | 2770 | NM_002069 | guanine nucleotide binding protein (G protein), |
| | | | alpha inhibiting activity polypeptide 1 |
| UTS2R | 2837 | NM_018949 | urotensin 2 receptor |
| MATN3 | 4148 | NM_002381 | matrilin 3 |
| NPTX1 | 4884 | NM_002522 | neuronal pentraxin I |
| SP140 | 11262 | NM_007237 | SP140 nuclear body protein |
| SMARCD1 | 6602 | NM_003076 | SWI/SNF related, matrix associated, actin |
| | | | dependent regulator of chromatin, subfamily d, |
| | | | member 1 |
| TRIM69 | 140691 | NM_080745 | tripartite motif-containing 69 |
| CDKN2D | 1032 | NM_001800 | cyclin-dependent kinase inhibitor 2D (p19, inhibits |
| | | | CDK4) |
| PAK6 | 56924 | NM_020168 | p21(CDKN1A)-activated kinase 6 |
| TACR2 | 6865 | NM_001057 | tachykinin receptor 2 |
| MMP17 | 4326 | NM_016155 | matrix metallopeptidase 17 (membrane-inserted) |
| MUC3A | 4584 | XM_374502 | mucin 3A, cell surface associated |
| PRKCZ | 5590 | NM_002744 | protein kinase C, zeta |
| TNFRSF17 | 608 | NM_001192 | tumor necrosis factor receptor superfamily, member |
| | | | 17 |
| GTF2IRD2 | 84163 | NM_173537 | GTF2I repeat domain containing 2 |
| TRPM3 | 80036 | NM_020952 | transient receptor potential cation channel, |
| | | | subfamily M, member 3 |
| HMBS | 3145 | NM_000190, | hydroxymethylbilane synthase |
| | | NM_176954 | |
| CYP27A1 | 1593 | NM_000784 | cytochrome P450, family 27, subfamily A, |
| | | | polypeptide 1 |
| FBXL20 | 84961 | NM_032875 | F-box and leucine-rich repeat protein 20 |
| CD300C | 10871 | NM_006678 | CD300c molecule |
| PSD | 5662 | NM_002779 | pleckstrin and Sec7 domain containing |
| FRAG1 | 27315 | NM_014489 | FGF receptor activating protein 1 |
| PCGF1 | 84759 | NM_032673 | polycomb group ring finger 1 |
| SIX2 | 10736 | NM_016932 | sine oculis homeobox homolog 2 (Drosophila) |
| CLCN1 | 1180 | NM_000083 | chloride channel 1, skeletal muscle (Thomsen |
| | | | disease, autosomal dominant) |
| EVL | 51466 | NM_016337 | Enah/Vasp-like |
| TOM1 | 10043 | NM_005488 | target of myb1 (chicken) |
| BAIAP2 | 10458 | NM_006340 | BAI1-associated protein 2 |
| ZFY | 7544 | NM_003411 | zinc finger protein, Y-linked |
| UBE2D1 | 7321 | NM_003338 | ubiquitin-conjugating enzyme E2D 1 (UBC4/5 |
| | | | homolog, yeast) |
| KRT18 | 3875 | NM_000224 | keratin 18 |
| GJA4 | 2701 | NM_002060 | gap junction protein, alpha 4, 37 kDa |
| SF3A2 | 8175 | NM_007165 | splicing factor 3a, subunit 2, 66 kDa |
| TRNT1 | 51095 | NM_016000 | tRNA nucleotidyl transferase, CCA-adding, 1 |
| RANGAP1 | 5905 | NM_002883 | Ran GTPase activating protein 1 |
| CCT4 | 10575 | NM_006430 | chaperonin containing TCP1, subunit 4 (delta) |
| TSPAN4 | 7106 | NM_003271 | tetraspanin 4 |
| PTGER2 | 5732 | NM_000956 | prostaglandin E receptor 2 (subtype EP2), 53 kDa |
| GTPBP4 | 23560 | NM_012341 | GTP binding protein 4 |
| ADRA1A | 148 | NM_000680 | adrenergic, alpha-1A-, receptor |
| PHB2 | 11331 | NM_007273 | prohibitin 2 |
| TNFRSF19L | 84957 | NM_032871 | tumor necrosis factor receptor superfamily, member |
| | | | 19-like |
| COL14A1 | 7373 | XM_044622 | collagen, type XIV, alpha 1 (undulin) |
| CD79A | 973 | NM_001783 | CD79a molecule, immunoglobulin-associated alpha |
| F12 | 2161 | NM_000505 | coagulation factor XII (Hageman factor) |
| ASMT | 438 | NM_004043 | acetylserotonin O-methyltransferase |
| GRK6 | 2870 | NM_002082 | G protein-coupled receptor kinase 6 |
| GNRH2 | 2797 | NM_001501 | gonadotropin-releasing hormone 2 |
| SDHB | 6390 | NM_003000 | succinate dehydrogenase complex, subunit B, iron |
| | | | sulfur (Ip) |
| THBS2 | 7058 | NM_003247 | thrombospondin 2 |
| HIVEP2 | 3097 | NM_145975, | human immunodeficiency virus type I enhancer |
| | | NM_006734 | binding protein 2 |
| WASF1 | 8936 | NM_003931 | WAS protein family, member 1 |
| SSPN | 8082 | NM_005086 | sarcospan (Kras oncogene-associated gene) |
| ITGAV | 3685 | NM_002210 | integrin, alpha V (vitronectin receptor, alpha |
| | | | polypeptide, antigen CD51) |
| PLXNA2 | 5362 | XM_372810 | plexin A2 |
| IGF1 | 3479 | NM_000618 | insulin-like growth factor 1 (somatomedin C) |
| NCR3 | 259197 | NM_147130 | natural cytotoxicity triggering receptor 3 |
| TH | 7054 | NM_000360 | tyrosine hydroxylase |
| HMGCL | 3155 | NM_177229, | 3-hydroxymethyl-3-methylglutaryl-Coenzyme A |
| | | NM_000191 | lyase (hydroxymethylglutaricaciduria) |
| CENPJ | 55835 | NM_018451 | centromere protein J |
| FABP1 | 2168 | NM_001443 | fatty acid binding protein 1, liver |
| PRKAA2 | 5563 | NM_006252 | protein kinase, AMP-activated, alpha 2 catalytic |
| | | | subunit |
| CASP1 | 834 | NM_001223 | caspase 1, apoptosis-related cysteine peptidase |
| | | | (interleukin 1, beta, convertase) |
| CAPN1 | 823 | NM_005186 | calpain 1, (mu/l) large subunit |
| MCCC1 | 56922 | NM_020166 | methylcrotonoyl-Coenzyme A carboxylase 1 (alpha) |
| RAB7A | 7879 | NM_004637 | RAB7A, member RAS oncogene family |
| DBX1 | 120237 | XM_061930 | developing brain homeobox 1 |
| KIAA0196 | 9897 | NM_014846 | KIAA0196 |
| HLA-DRB1 | 3123 | NM_002124, | major histocompatibility complex, class II, DR beta 1 |
| | | NM_172672 | |
| MMACHC | 25974 | XM_032397 | methylmalonic aciduria (cobalamin deficiency) cblC |
| | | | type, with homocystinuria |
| TGFBI | 7045 | NM_000358 | transforming growth factor, beta-induced, 68 kDa |
| PPFIA4 | 8497 | XM_046751 | protein tyrosine phosphatase, receptor type, f |
| | | | polypeptide (PTPRF), interacting protein (liprin), |
| | | | alpha 4 |
| SORCS2 | 57537 | NM_020777 | sortilin-related VPS10 domain containing receptor 2 |
| BAI3 | 577 | NM_001704 | brain-specific angiogenesis inhibitor 3 |
| RFX1 | 5989 | NM_002918 | regulatory factor X, 1 (influences HLA class II |
| | | | expression) |
| IRAK3 | 11213 | NM_007199 | interleukin-1 receptor-associated kinase 3 |
| PA2G4 | 5036 | NM_006191 | proliferation-associated 2G4, 38 kDa |
| GCM2 | 9247 | NM_004752 | glial cells missing homolog 2 (Drosophila) |
| CHRND | 1144 | NM_000751 | cholinergic receptor, nicotinic, delta |
| USP54 | 159195 | NM_152586 | ubiquitin specific peptidase 54 |
| HNRPU | 3192 | NM_004501 | heterogeneous nuclear ribonucleoprotein U |
| | | | (scaffold attachment factor A) |
| NUTF2 | 10204 | NM_005796 | nuclear transport factor 2 |
| HNRPK | 3190 | NM_002140 | heterogeneous nuclear ribonucleoprotein K |
| ARCN1 | 372 | NM_001655 | archain 1 |
| TRAF1 | 7185 | NM_005658 | TNF receptor-associated factor 1 |
| TUBB2A | 7280 | NM_001069 | tubulin, beta 2A |
| ATG16L2 | 89849 | XM_058426 | ATG16 autophagy related 16-like 2 (S. cerevisiae) |
| ARSE | 415 | NM_000047 | arylsulfatase E (chondrodysplasia punctata 1) |
| SIDT1 | 54847 | NM_017699 | SID1 transmembrane family, member 1 |
| GNG11 | 2791 | NM_004126 | guanine nucleotide binding protein (G protein), |
| | | | gamma 11 |
| NAT9 | 26151 | NM_015654 | N-acetyltransferase 9 |
| MMP10 | 4319 | NM_002425 | matrix metallopeptidase 10 (stromelysin 2) |
| HOXD11 | 3237 | NM_021192 | homeobox D11 |
| POLR3G | 10622 | NM_006467 | polymerase (RNA) III (DNA directed) polypeptide G |
| | | | (32 kD) |
| TACC2 | 10579 | NM_006997 | transforming, acidic coiled-coil containing protein 2 |
| FGF2 | 2247 | NM_002006 | fibroblast growth factor 2 (basic) |
| BGN | 633 | NM_001711 | biglycan |
| C11orf68 | 83638 | NM_031450 | chromosome 11 open reading frame 68 |
| QSCN6 | 5768 | NM_002826 | quiescin Q6 |
| TRIM8 | 81603 | NM_030912 | tripartite motif-containing 8 |
| GJA3 | 2700 | NM_021954, | gap junction protein, alpha 3, 46 kDa |
| | | NM_029726 | |
| TMPRSS5 | 80975 | NM_030770 | transmembrane protease, serine 5 (spinesin) |
| TAF2 | 6873 | NM_003184 | TAF2 RNA polymerase II, TATA box binding protein |
| | | | (TBP)-associated factor, 150 kDa |
| OA48-18 | 10414 | NM_006107 | acid-inducible phosphoprotein |
| MKLN1 | 4289 | NM_013255 | muskelin 1, intracellular mediator containing kelch |
| | | | motifs |
| USP19 | 10869 | XM_496642 | ubiquitin specific peptidase 19 |
| SETDB1 | 9869 | NM_012432 | SET domain, bifurcated 1 |
| SLC25A19 | 60386 | NM_021734 | solute carrier family 25 (mitochondrial thiamine |
| | | | pyrophosphate carrier), member 19 |
| PTPRH | 5794 | NM_002842 | protein tyrosine phosphatase, receptor type, H |
| INTS4 | 92105 | NM_033547 | integrator complex subunit 4 |
| COPE | 11316 | NM_007263 | coatomer protein complex, subunit epsilon |
| PRKAG3 | 53632 | NM_017431 | protein kinase, AMP-activated, gamma 3 non- |
| | | | catalytic subunit |
| BPGM | 669 | NM_001724 | 2,3-bisphosphoglycerate mutase |
| PRAF2 | 11230 | NM_007213 | PRA1 domain family, member 2 |
| NFIL3 | 4783 | NM_005384 | nuclear factor, interleukin 3 regulated |
| CXCL12 | 6387 | NM_000609 | chemokine (C—X—C motif) ligand 12 (stromal cell- |
| | | | derived factor 1) |
| PLCH2 | 9651 | XM_371214 | phospholipase C, eta 2 |
| CHID1 | 66005 | NM_023947 | chitinase domain containing 1 |
| CEND1 | 51286 | NM_016564 | cell cycle exit and neuronal differentiation 1 |
| AMH | 268 | NM_000479 | anti-Mullerian hormone |
| HIST2H3C | 126961 | NM_021059 | histone cluster 2, H3c |
| CNKSR2 | 22866 | NM_014927 | connector enhancer of kinase suppressor of Ras 2 |
| MYL3 | 4634 | NM_000258 | myosin, light chain 3, alkali; ventricular, skeletal, |
| | | | slow |
| SORBS3 | 10174 | NM_005775 | sorbin and SH3 domain containing 3 |
| PFDN2 | 5202 | NM_012394 | prefoldin subunit 2 |
| SOD1 | 6647 | NM_000454 | superoxide dismutase 1, soluble (amyotrophic |
| | | | lateral sclerosis 1 (adult)) |
| RBBP8 | 5932 | NM_002894 | retinoblastoma binding protein 8 |
| PROSC | 11212 | NM_007198 | proline synthetase co-transcribed homolog |
| | | | (bacterial) |
| TRIP6 | 7205 | NM_003302 | thyroid hormone receptor interactor 6 |
| TNF | 7124 | NM_000594 | tumor necrosis factor (TNF superfamily, member 2) |
| HSFY2 | 159119 | NM_153716 | heat shock transcription factor, Y linked 2 |
| SCAMP4 | 113178 | NM_079834 | secretory carrier membrane protein 4 |
| TRPA1 | 8989 | NM_007332 | transient receptor potential cation channel, |
| | | | subfamily A, member 1 |
| HNRPM | 4670 | NM_005968 | heterogeneous nuclear ribonucleoprotein M |
| C2orf13 | 200558 | NM_173545 | chromosome 2 open reading frame 13 |
| AGER | 177 | NM_001136 | advanced glycosylation end product-specific |
| | | | receptor |
| GFER | 2671 | NM_005262 | growth factor, augmenter of liver regeneration |
| | | | (ERV1 homolog, S. cerevisiae) |
| ERH | 2079 | NM_004450 | enhancer of rudimentary homolog (Drosophila) |
| PAQR6 | 79957 | NM_024897 | progestin and adipoQ receptor family member VI |
| UNC13B | 10497 | NM_006377 | unc-13 homolog B (C. elegans) |
| EGLN2 | 112398 | NM_053046 | egl nine homolog 2 (C. elegans) |
| FGFR1 | 2260 | NM_000604 | fibroblast growth factor receptor 1 (fms-related |
| | | | tyrosine kinase 2, Pfeiffer syndrome) |
| CARKL | 23729 | NM_013276 | carbohydrate kinase-like |
| SEMA4B | 10509 | NM_020210 | sema domain, immunoglobulin domain (Ig), |
| | | | transmembrane domain (TM) and short cytoplasmic |
| | | | domain, (semaphorin) 4B |
| TUBGCP6 | 85378 | NM_020461 | tubulin, gamma complex associated protein 6 |
| ICT1 | 3396 | NM_001545, | immature colon carcinoma transcript 1 |
| | | NM_016879 | |
| WFDC2 | 10406 | NM_006103 | WAP four-disulfide core domain 2 |
| CPNE6 | 9362 | NM_006032 | copine VI (neuronal) |
| CAMKV | 79012 | NM_024046 | CaM kinase-like vesicle-associated |
| LOC285643 | 285643 | XM_209695 | KIF4B |
| C18orf8 | 29919 | NM_013326 | chromosome 18 open reading frame 8 |
| LOR | 4014 | NM_000427 | loricrin |
| ADM | 133 | NM_001124 | adrenomedullin |
| LIF | 3976 | NM_002309 | leukemia inhibitory factor (cholinergic differentiation |
| | | | factor) |
| KIF11 | 3832 | NM_004523 | kinesin family member 11 |
| FANCC | 2176 | NM_000136 | Fanconi anemia, complementation group C |
| NOXO1 | 124056 | NM_144603 | NADPH oxidase organizer 1 |
| UBE1L2 | 55236 | NM_018227 | ubiquitin-activating enzyme E1-like 2 |
| P2RX1 | 5023 | NM_002558 | purinergic receptor P2X, ligand-gated ion channel, 1 |
| NPTN | 27020 | NM_012428 | neuroplastin |
| STAT3 | 6774 | NM_003150 | signal transducer and activator of transcription 3 |
| | | | (acute-phase response factor) |
| PDCD5 | 9141 | NM_004708 | programmed cell death 5 |

[0110] Agents that modulate the activity of products of autophagy-enhancing genes are also useful in the treatment of autophagy-related diseases. For example, agents that inhibit the activity of products of autophagy-enhancing genes result in reduced autophagy levels and are therefore useful in methods of inhibition of autophagy and the treatment of autophagy-related diseases that are responsive to autophagy inhibition, such as cancer and pancreatitis. Agents that enhance the activity of products of autophagy-enhancing genes result in elevated autophagy levels and are therefore useful in methods of enhancement of autophagy and the treatment of autophagy-related diseases that are responsive to elevated levels of autophagy, such as neurodegenerative diseases and proteinopathies.

TABLE 2
Autophagy-enhancing genes.

| Gene | | Genbank Acc. | |
|---|---|---|---|
| Symbol | Gene ID | No. | Gene Name |
| SMYD3 | 64754 | NM_022743 | SET and MYND domain |
| | | | containing 3 |
| TCEB3 | 6924 | NM_003198 | transcription elongation |
| | | | factor B (SIII), |
| | | | polypeptide 3 |
| | | | (110 kDa, elongin A) |
| CATSPER4 | 378807 | XM_371237 | cation channel, sperm |
| | | | associated 4 |
| MEGF10 | 84466 | NM_032446 | multiple EGF-like-domains 10 |
| KIF5C | 3800 | XM_377774 | kinesin family member 5C |
| ATG7 | 10533 | NM_006395 | ATG7 autophagy related 7 |
| | | | homolog (S. cerevisiae) |
| RELA | 5970 | NM_021975 | v-rel reticuloendotheliosis |
| | | | viral oncogene homolog A, |
| | | | nuclear factor of kappa light |
| | | | polypeptide gene enhancer in |
| | | | B-cells 3, p65 (avian) |
| GAB1 | 2549 | NM_002039 | GRB2-associated binding |
| | | | protein 1 |
| LOC285647 | 285647 | XM_209700 | suppressor of defective |
| | | | silencing 3 pseudogene |
| GPR18 | 2841 | NM_005292, | G protein-coupled receptor 18 |
| | | NM_145948 | |
| MBP | 4155 | NM_002385 | myelin basic protein |
| PDCL | 5082 | NM_005388 | phosducin-like |
| STIM1 | 6786 | NM_003156 | stromal interaction molecule 1 |
| NFKB1 | 4790 | NM_003998 | nuclear factor of kappa light |
| | | | polypeptide gene enhancer |
| | | | in B-cells 1 (p105) |
| TPR | 7175 | NM_003292 | translocated promoter |
| | | | region (to activated MET |
| | | | oncogene) |
| PGGT1B | 5229 | NM_005023 | protein |
| | | | geranylgeranyltransferase |
| | | | type I, beta subunit |
| ATG5 | 9474 | NM_004849 | ATG5 autophagy related 5 |
| | | | homolog (S. cerevisiae) |

[0111] Thus, certain embodiments of the present invention relate to methods of enhancing autophagy and/or treating neurodegenerative diseases and/or proteinopathies through the inhibition of the activity of products of the autophagy-inhibiting genes listed in Table 1 or the enhancement of the activity of products of the autophagy-enhancing genes listed in Table 2. Other embodiments of the present invention relate to methods of inhibiting autophagy and/or treating cancer or pancreatitis through the enhancement of the activity of products of the autophagy-inhibiting genes listed in Table 1 or the inhibition of the activity of products of the autophagy-enhancing genes listed in Table 2.

[0112] Other embodiments of the present invention relate to methods of enhancing autophagy and/or treating neurodegenerative diseases and/or proteinopathies through the inhibition of the activity of products of the autophagy-inhibiting genes listed in Table 3 or the enhancement of the activity of products of the autophagy-enhancing genes listed in Table 4. Other embodiments of the present invention relate to methods of inhibiting autophagy and/or treating cancer or pancreatitis through the enhancement of the activity of products of the autophagy-inhibiting genes listed in Table 3 or the inhibition of the activity of products of the autophagy-enhancing genes listed in Table 4.

TABLE 3
Autophagy-inhibiting genes.

| Gene | | | |
|---|---|---|---|
| Symbol | Gene ID | Genbank Acc. No. | Gene Name |
| GHSR | 2693 | NM_004122 | growth hormone secretagogue receptor |
| TINP1 | 10412 | NM_014886 | TGF beta-inducible nuclear protein 1 |
| CHAF1B | 8208 | NM_005441 | chromatin assembly factor 1, subunit B (p60) |
| COX5A | 9377 | NM_004255 | cytochrome c oxidase subunit Va |
| IHPK3 | 117283 | NM_054111 | inositol hexaphosphate kinase 3 |
| CENPE | 1062 | NM_001813 | centromere protein E, 312 kDa |
| CLCF1 | 23529 | NM_013246 | cardiotrophin-like cytokine factor 1 |
| KIAA0133 | 9816 | XM_375851 | KIAA0133 |
| ADMR | 11318 | NM_007264 | adrenomedullin receptor |
| OGDH | 4967 | NM_002541 | oxoglutarate (alpha-ketoglutarate) dehydrogenase |
| | | | (lipoamide) |
| DDX24 | 57062 | NM_020414 | DEAD (Asp-Glu-Ala-Asp, SEQ ID NO: 1) box |
| | | | polypeptide 24 |
| NUPR1 | 26471 | NM_012385 | nuclear protein 1 |
| FXYD2 | 486 | NM_001680 | FXYD domain containing ion transport regulator 2 |
| TRHR | 7201 | NM_003301 | thyrotropin-releasing hormone receptor |
| SUV39H1 | 6839 | NM_003173 | suppressor of variegation 3-9 homolog 1 |
| | | | (Drosophila) |
| FCER1A | 2205 | NM_002001 | Fc fragment of IgE, high affinity I, receptor for; alpha |
| | | | polypeptide |
| PTPRU | 10076 | NM_005704 | protein tyrosine phosphatase, receptor type, U |
| GPX2 | 2877 | NM_002083 | glutathione peroxidase 2 (gastrointestinal) |
| EP300 | 2033 | NM_001429 | E1A binding protein p300 |
| LOC388959 | 388959 | XM_373989 | hypothetical LOC388959 |
| NTN2L | 4917 | NM_006181 | netrin 2-like (chicken) |
| DOCK8 | 81704 | NM_203447 | dedicator of cytokinesis 8 |
| MAP3K7IP1 | 10454 | NM_006116 | mitogen-activated protein kinase kinase kinase 7 |
| | | | interacting protein 1 |
| PLAGL2 | 5326 | NM_002657 | pleiomorphic adenoma gene-like 2 |
| NUDT1 | 4521 | NM_002452 | nudix (nucleoside diphosphate linked moiety X)- |
| | | | type motif 1 |
| RELN | 5649 | NM_005045 | reelin |
| PNKD | 25953 | NM_015488 | paroxysmal nonkinesiogenic dyskinesia |
| GNG5 | 2787 | NM_005274 | guanine nucleotide binding protein (G protein), |
| | | | gamma 5 |
| CHKA | 1119 | NM_001277 | choline kinase alpha |
| C5AR1 | 728 | NM_001736 | complement component 5a receptor 1 |
| SCOTIN | 51246 | NM_016479 | scotin |
| PIGY | 84992 | NM_032906 | phosphatidylinositol glycan anchor biosynthesis, |
| | | | class Y |
| NAGK | 55577 | NM_017567 | N-acetylglucosamine kinase |
| RAGE | 5891 | NM_014226 | renal tumor antigen |
| USP24 | 23358 | XM_165973 | ubiquitin specific peptidase 24 |
| AURKA | 6790 | NM_003600 | aurora kinase A |
| PLDN | 26258 | NM_012388 | pallidin homolog (mouse) |
| PPARD | 5467 | NM_006238 | peroxisome proliferator-activated receptor delta |
| HRC | 3270 | NM_002152 | histidine rich calcium binding protein |
| NNMT | 4837 | NM_006169 | nicotinamide N-methyltransferase |
| COPB2 | 9276 | NM_004766 | coatomer protein complex, subunit beta 2 (beta |
| | | | prime) |
| CDK5RAP3 | 80279 | NM_025197 | CDK5 regulatory subunit associated protein 3 |
| NLK | 51701 | NM_016231 | nemo-like kinase |
| PFKL | 5211 | NM_002626 | phosphofructokinase, liver |
| RNPEPL1 | 57140 | NM_018226 | arginyl aminopeptidase (aminopeptidase B)-like 1 |
| EPHA6 | 203806 | XM_114973 | EPH receptor A6 |
| CDCA8 | 55143 | NM_018101 | cell division cycle associated 8 |
| CKAP5 | 9793 | NM_014756 | cytoskeleton associated protein 5 |
| ZBTB16 | 7704 | NM_006006 | zinc finger and BTB domain containing 16 |
| GABBR2 | 9568 | NM_005458 | gamma-aminobutyric acid (GABA) B receptor, 2 |
| PTMA | 5757 | NM_002823 | prothymosin, alpha (gene sequence 28) |
| PTCRA | 171558 | NM_138296 | pre T-cell antigen receptor alpha |
| RORC | 6097 | NM_005060 | RAR-related orphan receptor C |
| GNAI1 | 2770 | NM_002069 | guanine nucleotide binding protein (G protein), |
| | | | alpha inhibiting activity polypeptide 1 |
| UTS2R | 2837 | NM_018949 | urotensin 2 receptor |
| MATN3 | 4148 | NM_002381 | matrilin 3 |
| NPTX1 | 4884 | NM_002522 | neuronal pentraxin I |
| SP140 | 11262 | NM_007237 | SP140 nuclear body protein |
| SMARCD1 | 6602 | NM_003076 | SWI/SNF related, matrix associated, actin |
| | | | dependent regulator of chromatin, subfamily d, |
| | | | member 1 |
| PAK6 | 56924 | NM_020168 | p21(CDKN1A)-activated kinase 6 |
| TACR2 | 6865 | NM_001057 | tachykinin receptor 2 |
| MMP17 | 4326 | NM_016155 | matrix metallopeptidase 17 (membrane-inserted) |
| MUC3A | 4584 | XM_374502 | mucin 3A, cell surface associated |
| PRKCZ | 5590 | NM_002744 | protein kinase C, zeta |
| TNFRSF17 | 608 | NM_001192 | tumor necrosis factor receptor superfamily, member |
| | | | 17 |
| GTF2IRD2 | 84163 | NM_173537 | GTF2I repeat domain containing 2 |
| TRPM3 | 80036 | NM_020952 | transient receptor potential cation channel, |
| | | | subfamily M, member 3 |
| HMBS | 3145 | NM_000190, | hydroxymethylbilane synthase |
| | | NM_176954 | |
| CYP27A1 | 1593 | NM_000784 | cytochrome P450, family 27, subfamily A, |
| | | | polypeptide 1 |
| FBXL20 | 84961 | NM_032875 | F-box and leucine-rich repeat protein 20 |
| CD300C | 10871 | NM_006678 | CD300c molecule |
| PSD | 5662 | NM_002779 | pleckstrin and Sec7 domain containing |
| FRAG1 | 27315 | NM_014489 | FGF receptor activating protein 1 |
| PCGF1 | 84759 | NM_032673 | polycomb group ring finger 1 |
| SIX2 | 10736 | NM_016932 | sine oculis homeobox homolog 2 (Drosophila) |
| CLCN1 | 1180 | NM_000083 | chloride channel 1, skeletal muscle (Thomsen |
| | | | disease, autosomal dominant) |
| EVL | 51466 | NM_016337 | Enah/Vasp-like |
| TOM1 | 10043 | NM_005488 | target of myb1 (chicken) |
| BAIAP2 | 10458 | NM_006340 | BAI1-associated protein 2 |
| ZFY | 7544 | NM_003411 | zinc finger protein, Y-linked |
| UBE2D1 | 7321 | NM_003338 | ubiquitin-conjugating enzyme E2D 1 (UBC4/5 |
| | | | homolog, yeast) |
| GJA4 | 2701 | NM_002060 | gap junction protein, alpha 4, 37 kDa |
| SF3A2 | 8175 | NM_007165 | splicing factor 3a, subunit 2, 66 kDa |
| TRNT1 | 51095 | NM_016000 | tRNA nucleotidyl transferase, CCA-adding, 1 |
| RANGAP1 | 5905 | NM_002883 | Ran GTPase activating protein 1 |
| CCT4 | 10575 | NM_006430 | chaperonin containing TCP1, subunit 4 (delta) |
| TSPAN4 | 7106 | NM_003271 | tetraspanin 4 |
| PTGER2 | 5732 | NM_000956 | prostaglandin E receptor 2 (subtype EP2), 53 kDa |
| GTPBP4 | 23560 | NM_012341 | GTP binding protein 4 |
| ADRA1A | 148 | NM_000680 | adrenergic, alpha-1A-, receptor |
| PHB2 | 11331 | NM_007273 | prohibitin 2 |
| TNFRSF19L | 84957 | NM_032871 | tumor necrosis factor receptor superfamily, member |
| | | | 19-like |
| COL14A1 | 7373 | XM_044622 | collagen, type XIV, alpha 1 (undulin) |
| CD79A | 973 | NM_001783 | CD79a molecule, immunoglobulin-associated alpha |
| F12 | 2161 | NM_000505 | coagulation factor XII (Hageman factor) |
| ASMT | 438 | NM_004043 | acetylserotonin O-methyltransferase |
| GRK6 | 2870 | NM_002082 | G protein-coupled receptor kinase 6 |
| GNRH2 | 2797 | NM_001501 | gonadotropin-releasing hormone 2 |
| SDHB | 6390 | NM_003000 | succinate dehydrogenase complex, subunit B, iron |
| | | | sulfur (Ip) |
| THBS2 | 7058 | NM_003247 | thrombospondin 2 |
| HIVEP2 | 3097 | NM_145975, | human immunodeficiency virus type I enhancer |
| | | NM_006734 | binding protein 2 |
| WASF1 | 8936 | NM_003931 | WAS protein family, member 1 |
| SSPN | 8082 | NM_005086 | sarcospan (Kras oncogene-associated gene) |
| ITGAV | 3685 | NM_002210 | integrin, alpha V (vitronectin receptor, alpha |
| | | | polypeptide, antigen CD51) |
| PLXNA2 | 5362 | XM_372810 | plexin A2 |
| NCR3 | 259197 | NM_147130 | natural cytotoxicity triggering receptor 3 |
| TH | 7054 | NM_000360 | tyrosine hydroxylase |
| HMGCL | 3155 | NM_177229, | 3-hydroxymethyl-3-methylglutaryl-Coenzyme A |
| | | NM_000191 | lyase (hydroxymethylglutaricaciduria) |
| CENPJ | 55835 | NM_018451 | centromere protein J |
| FABP1 | 2168 | NM_001443 | fatty acid binding protein 1, liver |
| CASP1 | 834 | NM_001223 | caspase 1, apoptosis-related cysteine peptidase |
| | | | (interleukin 1, beta, convertase) |
| MCCC1 | 56922 | NM_020166 | methylcrotonoyl-Coenzyme A carboxylase 1 (alpha) |
| DBX1 | 120237 | XM_061930 | developing brain homeobox 1 |
| KIAA0196 | 9897 | NM_014846 | KIAA0196 |
| HLA-DRB1 | 3123 | NM_002124, | major histocompatibility complex, class II, DR beta 1 |
| | | NM_172672 | |
| MMACHC | 25974 | XM_032397 | methylmalonic aciduria (cobalamin deficiency) cblC |
| | | | type, with homocystinuria |
| TGFBI | 7045 | NM_000358 | transforming growth factor, beta-induced, 68 kDa |
| PPFIA4 | 8497 | XM_046751 | protein tyrosine phosphatase, receptor type, f |
| | | | polypeptide (PTPRF), interacting protein (liprin), |
| | | | alpha 4 |
| SORCS2 | 57537 | NM_020777 | sortilin-related VPS10 domain containing receptor 2 |
| BAI3 | 577 | NM_001704 | brain-specific angiogenesis inhibitor 3 |
| RFX1 | 5989 | NM_002918 | regulatory factor X, 1 (influences HLA class II |
| | | | expression) |
| IRAK3 | 11213 | NM_007199 | interleukin-1 receptor-associated kinase 3 |
| PA2G4 | 5036 | NM_006191 | proliferation-associated 2G4, 38 kDa |
| GCM2 | 9247 | NM_004752 | glial cells missing homolog 2 (Drosophila) |
| CHRND | 1144 | NM_000751 | cholinergic receptor, nicotinic, delta |
| USP54 | 159195 | NM_152586 | ubiquitin specific peptidase 54 |
| HNRPU | 3192 | NM_004501 | heterogeneous nuclear ribonucleoprotein U |
| | | | (scaffold attachment factor A) |
| NUTF2 | 10204 | NM_005796 | nuclear transport factor 2 |
| HNRPK | 3190 | NM_002140 | heterogeneous nuclear ribonucleoprotein K |
| ARCN1 | 372 | NM_001655 | archain 1 |
| TRAF1 | 7185 | NM_005658 | TNF receptor-associated factor 1 |
| TUBB2A | 7280 | NM_001069 | tubulin, beta 2A |
| ATG16L2 | 89849 | XM_058426 | ATG16 autophagy related 16-like 2 (S. cerevisiae) |
| ARSE | 415 | NM_000047 | arylsulfatase E (chondrodysplasia punctata 1) |
| SIDT1 | 54847 | NM_017699 | SID1 transmembrane family, member 1 |
| GNG11 | 2791 | NM_004126 | guanine nucleotide binding protein (G protein), |
| | | | gamma 11 |
| NAT9 | 26151 | NM_015654 | N-acetyltransferase 9 |
| MMP10 | 4319 | NM_002425 | matrix metallopeptidase 10 (stromelysin 2) |
| HOXD11 | 3237 | NM_021192 | homeobox D11 |
| POLR3G | 10622 | NM_006467 | polymerase (RNA) III (DNA directed) polypeptide G |
| | | | (32 kD) |
| TACC2 | 10579 | NM_006997 | transforming, acidic coiled-coil containing protein 2 |
| BGN | 633 | NM_001711 | biglycan |
| C11orf68 | 83638 | NM_031450 | chromosome 11 open reading frame 68 |
| QSCN6 | 5768 | NM_002826 | quiescin Q6 |
| TRIM8 | 81603 | NM_030912 | tripartite motif-containing 8 |
| GJA3 | 2700 | NM_021954, | gap junction protein, alpha 3, 46 kDa |
| | | NM_029726 | |
| TMPRSS5 | 80975 | NM_030770 | transmembrane protease, serine 5 (spinesin) |
| TAF2 | 6873 | NM_003184 | TAF2 RNA polymerase II, TATA box binding protein |
| | | | (TBP)-associated factor, 150 kDa |
| OA48-18 | 10414 | NM_006107 | acid-inducible phosphoprotein |
| MKLN1 | 4289 | NM_013255 | muskelin 1, intracellular mediator containing kelch |
| | | | motifs |
| USP19 | 10869 | XM_496642 | ubiquitin specific peptidase 19 |
| SETDB1 | 9869 | NM_012432 | SET domain, bifurcated 1 |
| SLC25A19 | 60386 | NM_021734 | solute carrier family 25 (mitochondrial thiamine |
| | | | pyrophosphate carrier), member 19 |
| PTPRH | 5794 | NM_002842 | protein tyrosine phosphatase, receptor type, H |
| INTS4 | 92105 | NM_033547 | integrator complex subunit 4 |
| COPE | 11316 | NM_007263 | coatomer protein complex, subunit epsilon |
| PRKAG3 | 53632 | NM_017431 | protein kinase, AMP-activated, gamma 3 non- |
| | | | catalytic subunit |
| BPGM | 669 | NM_001724 | 2,3-bisphosphoglycerate mutase |
| PRAF2 | 11230 | NM_007213 | PRA1 domain family, member 2 |
| NFIL3 | 4783 | NM_005384 | nuclear factor, interleukin 3 regulated |
| CXCL12 | 6387 | NM_000609 | chemokine (C-X-C motif) ligand 12 (stromal cell- |
| | | | derived factor 1) |
| PLCH2 | 9651 | XM_371214 | phospholipase C, eta 2 |
| CHID1 | 66005 | NM_023947 | chitinase domain containing 1 |
| CEND1 | 51286 | NM_016564 | cell cycle exit and neuronal differentiation 1 |
| HIST2H3C | 126961 | NM_021059 | histone cluster 2, H3c |
| CNKSR2 | 22866 | NM_014927 | connector enhancer of kinase suppressor of Ras 2 |
| MYL3 | 4634 | NM_000258 | myosin, light chain 3, alkali; ventricular, skeletal, |
| | | | slow |
| SORBS3 | 10174 | NM_005775 | sorbin and SH3 domain containing 3 |
| PFDN2 | 5202 | NM_012394 | prefoldin subunit 2 |
| RBBP8 | 5932 | NM_002894 | retinoblastoma binding protein 8 |
| PROSC | 11212 | NM_007198 | proline synthetase co-transcribed homolog |
| | | | (bacterial) |
| TRIP6 | 7205 | NM_003302 | thyroid hormone receptor interactor 6 |
| HSFY2 | 159119 | NM_153716 | heat shock transcription factor, Y linked 2 |
| SCAMP4 | 113178 | NM_079834 | secretory carrier membrane protein 4 |
| TRPA1 | 8989 | NM_007332 | transient receptor potential cation channel, |
| | | | subfamily A, member 1 |
| HNRPM | 4670 | NM_005968 | heterogeneous nuclear ribonucleoprotein M |
| C2orf13 | 200558 | NM_173545 | chromosome 2 open reading frame 13 |
| AGER | 177 | NM_001136 | advanced glycosylation end product-specific |
| | | | receptor |
| GFER | 2671 | NM_005262 | growth factor, augmenter of liver regeneration |
| | | | (ERV1 homolog, S. cerevisiae) |
| ERH | 2079 | NM_004450 | enhancer of rudimentary homolog (Drosophila) |
| PAQR6 | 79957 | NM_024897 | progestin and adipoQ receptor family member VI |
| UNC13B | 10497 | NM_006377 | unc-13 homolog B (C. elegans) |
| EGLN2 | 112398 | NM_053046 | egl nine homolog 2 (C. elegans) |
| FGFR1 | 2260 | NM_000604 | fibroblast growth factor receptor 1 (fms-related |
| | | | tyrosine kinase 2, Pfeiffer syndrome) |
| CARKL | 23729 | NM_013276 | carbohydrate kinase-like |
| SEMA4B | 10509 | NM_020210 | sema domain, immunoglobulin domain (Ig), |
| | | | transmembrane domain (TM) and short cytoplasmic |
| | | | domain, (semaphorin) 4B |
| TUBGCP6 | 85378 | NM_020461 | tubulin, gamma complex associated protein 6 |
| ICT1 | 3396 | NM_001545, | immature colon carcinoma transcript 1 |
| | | NM_016879 | |
| WFDC2 | 10406 | NM_006103 | WAP four-disulfide core domain 2 |
| CPNE6 | 9362 | NM_006032 | copine VI (neuronal) |
| CAMKV | 79012 | NM_024046 | CaM kinase-like vesicle-associated |
| LOC285643 | 285643 | XM_209695 | KIF4B |
| C18orf8 | 29919 | NM_013326 | chromosome 18 open reading frame 8 |
| LOR | 4014 | NM_000427 | loricrin |
| ADM | 133 | NM_001124 | adrenomedullin |
| KIF11 | 3832 | NM_004523 | kinesin family member 11 |
| FANCC | 2176 | NM_000136 | Fanconi anemia, complementation group C |
| NOXO1 | 124056 | NM_144603 | NADPH oxidase organizer 1 |
| UBE1L2 | 55236 | NM_018227 | ubiquitin-activating enzyme E1-like 2 |
| P2RX1 | 5023 | NM_002558 | purinergic receptor P2X, ligand-gated ion channel, 1 |
| NPTN | 27020 | NM_012428 | neuroplastin |
| PDCD5 | 9141 | NM_004708 | programmed cell death 5 |

TABLE 4
Autophagy-enhancing genes.

| Gene | | Genbank Acc. | |
|---|---|---|---|
| Symbol | Gene ID | No. | Gene Name |
| SMYD3 | 64754 | NM_022743 | SET and MYND domain |
| | | | containing 3 |
| TCEB3 | 6924 | NM_003198 | transcription elongation |
| | | | factor B (SIII), polypeptide 3 |
| | | | (110 kDa, elongin A) |
| CATSPER4 | 378807 | XM_371237 | cation channel, sperm |
| | | | associated 4 |
| MEGF10 | 84466 | NM_032446 | multiple EGF-like-domains 10 |
| KIF5C | 3800 | XM_377774 | kinesin family member 5C |
| RELA | 5970 | NM_021975 | v-rel reticuloendotheliosis |
| | | | viral oncogene homolog A, |
| | | | nuclear factor of kappa light |
| | | | polypeptide gene enhancer in |
| | | | B-cells 3, p65 (avian) |
| GAB1 | 2549 | NM_002039 | GRB2-associated binding |
| | | | protein 1 |
| LOC285647 | 285647 | XM_209700 | suppressor of defective |
| | | | silencing 3 pseudogene |
| GPR18 | 2841 | NM_005292, | G protein-coupled receptor 18 |
| | | NM_145948 | |
| PDCL | 5082 | NM_005388 | phosducin-like |
| STIM1 | 6786 | NM_003156 | stromal interaction molecule 1 |
| NFKB1 | 4790 | NM_003998 | Nuclear factor of kappa light |
| | | | polypeptide gene enhancer |
| | | | in B-cells 1 |
| TPR | 7175 | NM_003292 | translocated promoter region |
| | | | (to activated MET oncogene) |
| PGGT1B | 5229 | NM_005023 | protein |
| | | | geranylgeranyltransferase |
| | | | type I, beta subunit |

[0113] The products of the autophagy-related genes of the invention can be classified into a number of non-mutually exclusive categories. For example, certain gene products of the present invention can be classified as oxidoreductases, receptors, proteases, ligases, kinases, synthases, synthetases, chaperones, hydrolases, membrane traffic proteins, calcium binding proteins and/or regulatory molecules. The classification of selected autophagy-inhibiting gene products is listed in Table 5, while the classification of selected autophagy-enhancing gene products is listed in Table 6. Since certain types of agents are better suited for the modulation of the activity of a specific class of gene product, in some embodiments the present invention is directed towards the modulation of one or more class of autophagy-related gene product.

TABLE 5
Classification of certain autophagy-inhibiting gene products.

| Gene | | |
|---|---|---|
| Symbol | Gene Name | Class |
| CYP27A1 | cytochrome P450, family 27, | Oxidoreductase |
| | subfamily A, polypeptide 1; | |
| | CYP27A1 | |
| SDHB | succinate dehydrogenase complex, | Oxidoreductase |
| | subunit B, iron sulfur (Ip); SDHB | |
| OGDH | oxoglutarate (alpha-ketoglutarate) | Oxidoreductase |
| | dehydrogenase (lipoamide); OGDH | |
| QSCN6 | quiescin Q6; QSCN6 | Oxidoreductase |
| EGLN2 | egl nine homolog 2 (C. elegans); | Oxidoreductase |
| | EGLN2 | |
| TH | tyrosine hydroxylase; TH | Oxidoreductase |
| COX5A | cytochrome c oxidase subunit Va; | Oxidoreductase |
| | COX5A | |
| SOD1 | superoxide dismutase 1, soluble | Oxidoreductase |
| | (amyotrophic lateral sclerosis 1 | |
| | (adult); SOD1 | |
| GPX2 | glutathione peroxidase 2 | Oxidoreductase |
| | (gastrointestinal); GPX2 | |
| GFER | growth factor, augmenter of liver | Oxidoreductase |
| | regeneration (ERV1 homolog, | |
| | S. cerevisiae); GFER | |
| TRPM3 | transient receptor potential cation, | Receptor |
| | channel subfamily M, member 3; | |
| | TRPM3 | |
| TMPRSS5 | transmembrane protease, serine 5 | Receptor |
| | (spinesin); TMPRSS5 | |
| IRAK3 | interleukin-1 receptor-associated | Receptor |
| | kinase 3; IRAK3 | |
| ADMR(Also | adrenomedullin receptor; ADMR | Receptor |
| Known as | | |
| GPR182) | | |
| FGFR1 | fibroblast growth factor receptor 1 | Receptor |
| | (fms-related tyrosine kinase 2, | |
| | Pfeiffer syndrome); FGFR1 | |
| UNC13B | unc-13 homolog B (C. elegans); | Receptor |
| | UNC13B | |
| PTGER2 | prostaglandin E receptor 2 (subtype | Receptor |
| | EP2), 53 kDa; PTGER2 | |
| AGER | advanced glycosylation end product- | Receptor |
| | specific receptor; AGER | |
| BGN | biglycan; BGN | Receptor |
| GABBR2 | gamma-aminobutyric acid (GABA) B | Receptor |
| | receptor, 2; GABBR2 | |
| PPARD | peroxisome proliferator-activated | Receptor |
| | receptor delta; PPARD | |
| GHSR | growth hormone secretagogue | Receptor |
| | receptor; GHSR | |
| BAIAP2 | BAI1-associated protein 2; BAIAP2 | Receptor |
| SORCS2 | sortilin-related VPS10 domain | Receptor |
| | containing receptor 2; SORCS2 | |
| PAQR6 | progestin and adipoQ receptor family | Receptor |
| | member VI; PAQR6 | |
| EPHA6 | EPH receptor A6; EPHA6 | Receptor |
| TRHR | thyrotropin-releasing hormone | Receptor |
| | receptor; TRHR | |
| C5AR1 | complement component 5a receptor | Receptor |
| | 1; C5AR1 | |
| BAI3 | brain-specific angiogenesis inhibitor | Receptor |
| | 3; BAI3 | |
| TLR3 | toll-like receptor 3; TLR3 | Receptor |
| PTPRH | protein tyrosine phosphatase, receptor | Receptor |
| | type, H; PTPRH | |
| ADRA1A | adrenergic, alpha-1A-, receptor; | Receptor |
| | ADRA1A | |
| UTS2R | urotensin 2 receptor; UTS2R | Receptor |
| RORC | RAR-related orphan receptor C; | Receptor |
| | RORC | |
| CHRND | cholinergic receptor, nicotinic, | Receptor |
| | delta; CHRND | |
| TACR2 | tachykinin receptor 2; TACR2 | Receptor |
| P2RX1 | purinergic receptor P2X, ligand-gated | Receptor |
| | ion channel, 1; P2RX1 | |
| PLXNA2 | plexin A2; PLXNA2 | Receptor |
| PTPRU | protein tyrosine phosphatase, receptor | Receptor |
| | type, U; PTPRU | |
| FCER1A | Fc fragment of IgE, high affinity I, | Receptor |
| | receptor for; alpha polypeptide; | |
| | FCER1A | |
| CD300C | CD300c molecule; CD300C | Receptor |
| TNFRSF19L | tumor necrosis factor receptor | Receptor |
| (Also known | superfamily, member 19-like; | |
| as RELT) | TNFRSF19L | |
| TMPRSS5 | transmembrane protease, serine 5 | Protease |
| | (spinesin); TMPRSS5 | |
| USP19 | ubiquitin specific peptidase 19; | Protease |
| | USP19 | |
| RNPEPL1 | arginyl aminopeptidase | Protease |
| | (aminopeptidase B)-like 1; | |
| | RNPEPL1 | |
| MMP10 | matrix metallopeptidase 10 | Protease |
| | (stromelysin 2); MMP10 | |
| RELN | reelin; RELN | Protease |
| F12 | coagulation factor XII (Hageman | Protease |
| | factor); F12 | |
| CASP1 | caspase 1, apoptosis-related cysteine | Protease |
| | peptidase (interleukin 1, beta, | |
| | convertase); CASP1 | |
| MMP17 | matrix metallopeptidase 17 | Protease |
| | (membrane-inserted); MMP17 | |
| CAPN1 | calpain 1, (mu/l) large subunit; | Protease |
| | CAPN1 | |
| TRIM8 | tripartite motif-containing 8; TRIM8 | Ligase |
| UBE1L2(Also | ubiquitin-activating enzyme E1-like | Ligase |
| known as | 2; UBE1L2 | |
| UBA6) | | |
| MCCC1 | methylcrotonoyl-Coenzyme A | Ligase |
| | carboxylase 1 (alpha); MCCC1 | |
| TRIM69 | tripartite motif-containing 69; | Ligase |
| | TRIM69 | |
| UBE2D1 | ubiquitin-conjugating enzyme E2D 1 | Ligase |
| | (UBC4/5 homolog, yeast); UBE2D1 | |
| HMGCL | 3-hydroxymethyl-3-methylglutaryl- | Lyase |
| | Coenzyme A lyase | |
| | (hydroxymethylglutaricaciduria); | |
| | HMGCL | |
| PAK6 | p21(CDKN1A)-activated kinase 6; | Kinase |
| | PAK6 | |
| CHKA | choline kinase alpha; CHKA | Kinase |
| RAGE | renal tumor antigen; RAGE | Kinase |
| IHPK3(Also | inositol hexaphosphate kinase 3; | Kinase |
| known as | IHPK3 | |
| IP6K3) | | |
| CAMKV | CaM kinase-like vesicle- | Kinase |
| | associated; CAMKV | |
| PRKAA2 | protein kinase, AMP-activated, alpha | Kinase |
| | 2 catalytic subunit; PRKAA2 | |
| PRKCZ | protein kinase C, zeta; PRKCZ | Kinase |
| PRKCA | protein kinase C, alpha; PRKCA | Kinase |
| CARKL(Also | carbohydrate kinase-like; CARKL | Kinase |
| known as | | |
| SHPK) | | |
| PFKL | phosphofructokinase, liver; PFKL | Kinase |
| NLK | nemo-like kinase; NLK | Kinase |
| AURKA | aurora kinase A; AURKA | Kinase |
| PROSC | proline synthetase co-transcribed | Synthase & |
| | homolog (bacterial); PROSC | synthetase |
| CCT4 | chaperonin containing TCP1, subunit | Chaperone |
| | 4 (delta); CCT4 | |
| PFDN2 | prefoldin subunit 2; PFDN2 | Chaperone |
| CHID1 | chitinase domain containing 1; | Hydrolase |
| | CHID1 | |
| ARSE | arylsulfatase E (chondrodysplasia | Hydrolase |
| | punctata 1); ARSE | |
| PLCH2 | phospholipase C, eta 2; PLCH2 | Hydrolase |
| HMBS | hydroxymethylbilane synthase; | Hydrolase |
| | HMBS | |
| PNKD | paroxysmal nonkinesiogenic | Hydrolase |
| | dyskinesia; PNKD | |
| NUDT1 | nudix (nucleoside diphosphate linked | Hydrolase |
| | moiety X)-type motif 1; NUDT1 | |
| COPB2 | coatomer protein complex, subunit | Membrane traffic |
| | beta 2 (beta prime); COPB2 | protein |
| ARCN1 | archain 1; ARCN1 | Membrane traffic |
| | | protein |
| CPNE6 | copine VI (neuronal); CPNE6 | Membrane traffic |
| | | protein |
| COPE | coatomer protein complex, subunit | Membrane traffic |
| | epsilon; COPE | protein |
| HRC | histidine rich calcium binding | Calcium binding |
| | protein; HRC | protein |
| MYL3 | myosin, light chain 3, alkali; | Calcium binding |
| | ventricular, skeletal, slow; MYL3 | protein |
| RANGAP1 | Ran GTPase activating protein | Regulatory |
| | 1; RANGAP1 | molecule |
| GTPBP4 | GTP binding protein 4; GTPBP4 | Regulatory |
| | | molecule |
| TRIP6 | thyroid hormone receptor interactor | Regulatory |
| | 6; TRIP6 | molecule |
| CNKSR2 | connector enhancer of kinase | Regulatory |
| | suppressor of Ras 2; CNKSR2 | molecule |
| PSD | pleckstrin and Sec7 domain | Regulatory |
| | containing; PSD | molecule |
| DOCK8 | dedicator of cytokinesis 8; DOCK8 | Regulatory |
| | | molecule |
| THBS2 | thrombospondin 2; THBS2 | Regulatory |
| | | molecule |
| GNAI1 | guanine nucleotide binding protein (G | Regulatory |
| | protein), alpha inhibiting activity | molecule |
| | polypeptide 1; GNAI1 | |
| FRAG1 | FGF receptor activating protein | Regulatory |
| | 1; unassigned | molecule |
| RAB7A | RAB7, member RAS oncogene | Regulatory |
| | family; RAB7 | molecule |
| CDKN2D | cyclin-dependent kinase inhibitor | Regulatory |
| | 2D (p19, inhibits CDK4); | molecule |
| | CDKN2D | |
| GNG5 | guanine nucleotide binding protein (G | Regulatory |
| | protein), gamma 5; GNG5 | molecule |
| GNG11 | guanine nucleotide binding protein (G | Regulatory |
| | protein), gamma 11; GNG11 | molecule |
| PDCD5 | programmed cell death 5; PDCD5 | Regulatory |
| | | molecule |
| WFDC2 | WAP four-disulfide core domain 2; | Regulatory |
| | WFDC2 | molecule |

TABLE 6
Classification of certain autophagy-enhancing gene products.

| Gene | | |
|---|---|---|
| Symbol | Gene Name | Class |
| TPR | translocated promoter region (to activated | Receptor |
| | MET oncogene); TPR | |
| GPR18 | G protein-coupled receptor 18; GPR18 | Receptor |
| PDCL | phosducin-like; PDCL | Regulatory |
| | | molecule |

### 3. MODULATORS OF AUTOPHAGY-RELATED GENE PRODUCTS

[0114] Certain embodiments of the present invention relate to methods of modulating autophagy or treating autophagy-related diseases (e.g. neurodegenerative disease, liver disease, muscle disease, cancer, pancreatitis). These methods involve administering an agent that modulates the activity of one or more autophagy-related gene products of the invention. In certain embodiments, methods of the invention include treatment of autophagy-related diseases by administering to a subject an agent which decreases the activity of one or more products of the genes listed in Tables 1-4. In other embodiments, methods of the invention include treatment of autophagy-related diseases by administering to a subject an agent which increases the activity of one or more products of the genes listed in Tables 1-4. Agents which may be used to modulate the activity of a gene product listed in Tables 1-4, and to thereby treat or prevent an autophagy-related disease, include antibodies (e.g., conjugated antibodies), proteins, peptides, small molecules, RNA interfering agents, e.g., siRNA molecules, ribozymes, and antisense oligonucleotides.

[0115] Any agent that modulates the activity of an autophagy-related gene product of the invention can be used to practice certain methods of the invention. Such agents can be those described herein, those known in the art, or those identified through routine screening assays (e.g. the screening assays described herein).

[0116] In some embodiments, assays used to identify agents useful in the methods of the present invention include a reaction between the autophagy-related gene product and one or more assay components. The other components may be either a test compound (e.g. the potential agent), or a combination of test compounds and a natural binding partner of the autophagy-related gene product. Agents identified via such assays, such as those described herein, may be useful, for example, for modulating autophagy and treating autophagy-related diseases.

[0117] Agents useful in the methods of the present invention may be obtained from any available source, including systematic libraries of natural and/or synthetic compounds. Agents may also be obtained by any of the numerous approaches in combinatorial library methods known in the art, including: biological libraries; peptoid libraries (libraries of molecules having the functionalities of peptides, but with a novel, non-peptide backbone which are resistant to enzymatic degradation but which nevertheless remain bioactive; see, e.g., Zuckermann et al., 1994, J. Med. Chem. 37:2678-85); spatially addressable parallel solid phase or solution phase libraries; synthetic library methods requiring deconvolution; the ‘one-bead one-compound’ library method; and synthetic library methods using affinity chromatography selection. The biological library and peptoid library approaches are limited to peptide libraries, while the other four approaches are applicable to peptide, non-peptide oligomer or small molecule libraries of compounds (Lam, 1997, Anticancer Drug Des. 12:145).

[0118] Examples of methods for the synthesis of molecular libraries can be found in the art, for example in: DeWitt et al. (1993) Proc. Natl. Acad. Sci. U.S.A. 90:6909; Erb et al. (1994) Proc. Natl. Acad. Sci. USA 91:11422; Zuckermann et al. (1994). J. Med. Chem. 37:2678; Cho et al. (1993) Science 261:1303; Carrell et al. (1994) Angew. Chem. Int. Ed. Engl. 33:2059; Carell et al. (1994) Angew. Chem. Int. Ed. Engl. 33:2061; and in Gallop et al. (1994) J. Med. Chem. 37:1233.

[0119] Libraries of agents may be presented in solution (e.g., Houghten, 1992, Biotechniques 13:412-421), or on beads (Lam, 1991, Nature 354:82-84), chips (Fodor, 1993, Nature 364:555-556), bacteria and/or spores, (Ladner, U.S. Pat. No. 5,223,409), plasmids (Cull et al, 1992, Proc Natl Acad Sci USA 89:1865-1869) or on phage (Scott and Smith, 1990, Science 249:386-390; Devlin, 1990, Science 249:404-406; Cwirla et al, 1990, Proc. Natl. Acad. Sci. 87:6378-6382; Felici, 1991, J. Mol. Biol. 222:301-310; Ladner, supra.).

[0120] Agents useful in the methods of the present invention may be identified, for example, using assays for screening candidate or test compounds which are substrates of an autophagy-related gene product of the invention or biologically active portion thereof. In another embodiment, agents useful in the methods of the invention may be identified using assays for screening candidate or test compounds which bind to an autophagy-related gene product of the invention or a biologically active portion thereof. Determining the ability of the test compound to directly bind to an autophagy-related gene product can be accomplished, for example, by coupling the compound with a radioisotope or enzymatic label such that binding of the compound to the autophagy-related gene product can be determined by detecting the labeled compound in a complex. For example, compounds can be labeled with ¹²⁵I, ³⁵S, ¹⁴C, or ³H, either directly or indirectly, and the radioisotope detected by direct counting of radioemission or by scintillation counting. Alternatively, assay components can be enzymatically labeled with, for example, horseradish peroxidase, alkaline phosphatase, or luciferase, and the enzymatic label detected by determination of conversion of an appropriate substrate to product.

[0121] Agents useful in the methods of the invention may also be identified, for example, using assays that identify compounds which modulate (e.g., affect either positively or negatively) interactions between an autophagy-related gene product and its substrates and/or binding partners. Such compounds can include, but are not limited to, molecules such as antibodies, peptides, hormones, oligonucleotides, nucleic acids, and analogs thereof. Such compounds may also be obtained from any available source, including systematic libraries of natural and/or synthetic compounds.

[0122] The basic principle of the assay systems used to identify compounds that modulate the interaction between the autophagy-related gene product and its binding partner involves preparing a reaction mixture containing the autophagy-related gene product and its binding partner under conditions and for a time sufficient to allow the two products to interact and bind, thus forming a complex. In order to test an agent for inhibitory activity, the reaction mixture is prepared in the presence and absence of the test compound. The test compound can be initially included in the reaction mixture, or can be added at a time subsequent to the addition of the autophagy-related gene product and its binding partner. Control reaction mixtures are incubated without the test compound or with a placebo. The formation of any complexes between the autophagy-related gene product and its binding partner is then detected. The formation of a complex in the control reaction, but less or no such formation in the reaction mixture containing the test compound, indicates that the compound interferes with the interaction of the autophagy-related gene product and its binding partner. Conversely, the formation of more complex in the presence of the compound than in the control reaction indicates that the compound may enhance interaction of the autophagy-related gene product and its binding partner.

[0123] The assay for compounds that modulate the interaction of the autophagy-related gene product with its binding partner may be conducted in a heterogeneous or homogeneous format. Heterogeneous assays involve anchoring either the autophagy-related gene product or its binding partner onto a solid phase and detecting complexes anchored to the solid phase at the end of the reaction. In homogeneous assays, the entire reaction is carried out in a liquid phase. In either approach, the order of addition of reactants can be varied to obtain different information about the compounds being tested. For example, test compounds that interfere with the interaction between the autophagy-related gene products and the binding partners (e.g., by competition) can be identified by conducting the reaction in the presence of the test substance, i.e., by adding the test substance to the reaction mixture prior to or simultaneously with the autophagy-related gene product and its interactive binding partner. Alternatively, test compounds that disrupt preformed complexes, e.g., compounds with higher binding constants that displace one of the components from the complex, can be tested by adding the test compound to the reaction mixture after complexes have been formed. The various formats are briefly described below.

[0124] In a heterogeneous assay system, either the autophagy-related gene product or its binding partner is anchored onto a solid surface or matrix, while the other corresponding non-anchored component may be labeled, either directly or indirectly. In practice, microtitre plates are often utilized for this approach. The anchored species can be immobilized by a number of methods, either non-covalent or covalent, that are typically well known to one who practices the art. Non-covalent attachment can often be accomplished simply by coating the solid surface with a solution of the autophagy-related gene product or its binding partner and drying. Alternatively, an immobilized antibody specific for the assay component to be anchored can be used for this purpose.

[0125] In related assays, a fusion protein can be provided which adds a domain that allows one or both of the assay components to be anchored to a matrix. For example, glutathione-S-transferase/marker fusion proteins or glutathione-S-transferase/binding partner can be adsorbed onto glutathione sepharose beads (Sigma Chemical, St. Louis, Mo.) or glutathione derivatized microtiter plates, which are then combined with the test compound or the test compound and either the non-adsorbed autophagy-related gene product or its binding partner, and the mixture incubated under conditions conducive to complex formation (e.g., physiological conditions). Following incubation, the beads or microtiter plate wells are washed to remove any unbound assay components, the immobilized complex assessed either directly or indirectly, for example, as described above. Alternatively, the complexes can be dissociated from the matrix, and the level of autophagy-related gene product binding or activity determined using standard techniques.

[0126] A homogeneous assay may also be used to identify modulators of autophagy-related gene products. This is typically a reaction, analogous to those mentioned above, which is conducted in a liquid phase in the presence or absence of the test compound. The formed complexes are then separated from unreacted components, and the amount of complex formed is determined As mentioned for heterogeneous assay systems, the order of addition of reactants to the liquid phase can yield information about which test compounds modulate (inhibit or enhance) complex formation and which disrupt preformed complexes.

[0127] In such a homogeneous assay, the reaction products may be separated from unreacted assay components by any of a number of standard techniques, including but not limited to: differential centrifugation, chromatography, electrophoresis and immunoprecipitation. In differential centrifugation, complexes of molecules may be separated from uncomplexed molecules through a series of centrifugal steps, due to the different sedimentation equilibria of complexes based on their different sizes and densities (see, for example, Rivas, G., and Minton, A. P., Trends Biochem Sci 1993 August; 18(8):284-7). Standard chromatographic techniques may also be utilized to separate complexed molecules from uncomplexed ones. For example, gel filtration chromatography separates molecules based on size, and through the utilization of an appropriate gel filtration resin in a column format, for example, the relatively larger complex may be separated from the relatively smaller uncomplexed components. Similarly, the relatively different charge properties of the complex as compared to the uncomplexed molecules may be exploited to differentially separate the complex from the remaining individual reactants, for example through the use of ion-exchange chromatography resins. Such resins and chromatographic techniques are well known to one skilled in the art (see, e.g., Heegaard, 1998, J Mol. Recognit. 11:141-148; Hage and Tweed, 1997, J. Chromatogr. B. Biomed. Sci. Appl., 699:499-525). Gel electrophoresis may also be employed to separate complexed molecules from unbound species (see, e.g., Ausubel et al (eds.), In: Current Protocols in Molecular Biology, J. Wiley & Sons, New York. 1999). In this technique, protein or nucleic acid complexes are separated based on size or charge, for example. In order to maintain the binding interaction during the electrophoretic process, nondenaturing gels in the absence of reducing agent are typically preferred, but conditions appropriate to the particular interactants will be well known to one skilled in the art. Immunoprecipitation is another common technique utilized for the isolation of a protein-protein complex from solution (see, e.g., Ausubel et al (eds.), In: Current Protocols in Molecular Biology, J. Wiley & Sons, New York. 1999). In this technique, all proteins binding to an antibody specific to one of the binding molecules are precipitated from solution by conjugating the antibody to a polymer bead that may be readily collected by centrifugation. The bound assay components are released from the beads (through a specific proteolysis event or other technique well known in the art which will not disturb the protein-protein interaction in the complex), and a second immunoprecipitation step is performed, this time utilizing antibodies specific for the correspondingly different interacting assay component. In this manner, only formed complexes should remain attached to the beads. Variations in complex formation in both the presence and the absence of a test compound can be compared, thus offering information about the ability of the compound to modulate interactions between the autophagy-related gene product and its binding partner.

[0128] Modulators of autophagy-related gene product expression may also be identified, for example, using methods wherein a cell is contacted with a candidate compound and the expression of mRNA or protein, corresponding to an autophagy-related gene in the cell, is determined. The level of expression of mRNA or protein in the presence of the candidate compound is compared to the level of expression of mRNA or protein in the absence of the candidate compound. The candidate compound can then be identified as a modulator of autophagy-related gene product expression based on this comparison. For example, when expression of autophagy-related gene product is greater in the presence of the candidate compound than in its absence, the candidate compound is identified as a stimulator of marker mRNA or protein expression. Conversely, when expression of autophagy-related gene product is less in the presence of the candidate compound than in its absence, the candidate compound is identified as an inhibitor of marker mRNA or protein expression. The level of autophagy-related gene product expression in the cells can be determined by methods described herein for detecting marker mRNA or protein.

[0129] Agents that inhibit the activity of autophagy-inhibiting gene products are useful, for example, in enhancing autophagy and in the treatment of neurodegenerative diseases. Examples of such inhibitors of autophagy-inhibiting gene products are listed in Table 7 and FIG. 63.

TABLE 7
Agents that inhibit autophagy-inhibiting gene products.

| Target Gene | | |
|---|---|---|
| Symbol | Target Gene Name | Agent |
| TH | tyrosine hydroxylase; TH | alpha-methyl- |
| | | para-tyrosine |
| | | (Metyrosine) |
| FGFR1 | fibroblast growth factor receptor 1 (fms- | TK1258 |
| | related tyrosine kinase 2, Pfeiffer | (CHIR258) |
| | syndrome); FGFR1 | |
| AGER | advanced glycosylation end product- | PF 04494700 |
| | specific receptor; AGER | (TTP488) |
| C5AR1 | complement component 5a receptor | PMX53 |
| | 1; C5AR1 | |
| ADRA1A | adrenergic, alpha-1A-, receptor; ADRA1A | Tamsulosin |
| ADRA1A | adrenergic, alpha-1A-, receptor; ADRA1A | Doxazosin |
| ADRA1A | adrenergic, alpha-1A-, receptor; ADRA1A | Prazosin |
| | | hydrochloride |
| ADRA1A | adrenergic, alpha-1A-, receptor; ADRA1A | alfuzosin |
| | | hydrochloride |
| UTS2R | urotensin 2 receptor; UTS2R | Urotensin II |
| CHRND | cholinergic receptor, nicotinic, | Galantamine |
| | delta; CHRND | (Galanthamine) |
| CHRND | cholinergic receptor, nicotinic, | Mecamylamine |
| | delta; CHRND | hydrochloride |
| | | (Inversine) |
| CASP1 | caspase 1, apoptosis-related cysteine | Pralnacasan |
| | peptidase (interleukin 1, beta, | (VX-740, |
| | convertase); CASP1 | HMR |
| | | 3480) |
| PRKCA | protein kinase C, alpha; PRKCA | ISIS 3521 |
| | | (carboplatin, |
| | | paclitaxel) |
| PRKCA | protein kinase C, alpha; PRKCA | Gemcitabine; |
| PRKCA | protein kinase C, alpha; PRKCA | LY900003 |
| AURKA | aurora kinase A; AURKA | MK-5108 |
| PLCH2 | phospholipase C, eta 2; PLCH2 | U73122 |
| PLCH2 | phospholipase C, eta 2; PLCH2 | D609 |

[0130] Alternatively, agents that enhance the activity of autophagy-inhibiting gene products are useful, for example, in inhibiting autophagy and in the treatment of cancer and pancreatitis. Examples of such enhancers of autophagy-inhibiting gene products are listed in Table 8 and FIG. 63.

TABLE 8
Agents that enhance autophagy-inhibiting gene products.

| Target | | |
|---|---|---|
| Gene | | |
| Symbol | Target Gene Name | Agent |
| FGFR1 | fibroblast growth factor receptor 1 (fms- | Cardio Vascu- |
| | related tyrosine kinase 2, Pfeiffer | Grow (FGF-1, |
| | syndrome); FGFR1 | CVBT-141) |
| FGFR1 | fibroblast growth factor receptor 1 (fms- | Acidic FGF |
| | related tyrosine kinase 2, Pfeiffer | (aFGF); |
| | syndrome); FGFR1 | |
| FGFR1 | fibroblast growth factor receptor 1 (fms- | XRP0038 |
| | related tyrosine kinase 2, Pfeiffer | (NV1FGF) |
| | syndrome); FGFR1 | |
| FGFR1 | fibroblast growth factor receptor 1 (fms- | Rh-aFGF |
| | related tyrosine kinase 2, Pfeiffer | |
| | syndrome); FGFR1 | |
| PPARD | peroxisome proliferator-activated receptor | GW501516 |
| | delta; PPARD | |
| GHSR | growth hormone secretagogue | Ibutamoren |
| | receptor; GHSR | Mesylate |
| | | (MK-0677) |
| GHSR | growth hormone secretagogue | KP-102LN |
| | receptor; GHSR | |
| GHSR | growth hormone secretagogue | EP1572 (ghrelin |
| | receptor; GHSR | agonist) |
| TRHR | thyrotropin-releasing hormone | TRH |
| | receptor; TRHR | |
| TRHR | thyrotropin-releasing hormone | S-0373 |
| | receptor; TRHR | (KPS-0373) |
| TRHR | thyrotropin-releasing hormone | S-14820 |
| | receptor; TRHR | |
| TLR3 | toll-like receptor 3; TLR3 | Poly-ICR |
| TLR3 | toll-like receptor 3; TLR3 | CQ-07001 |
| PRKAA2 | protein kinase, AMP-activated, alpha 2 | cryptotanshinone |
| | catalytic subunit; PRKAA2 | |

[0131] Further examples of agents that modulate the autophagy-related gene products listed in tables 1-4 can be found in, for example, U.S. Pat. Nos. 7,348,140; 6,982,265; 6,723,694; 6,617,311; 6,372,250; 6,334,998; 6,319,905; 6,312,949; 6,297,238; 6,228,835; 6,214,334; 6,096,778; 5,990,083; 5,834,457; 5,783,683; 5,681,747; 5,556,837; 5,464,614, each of which is hereby specifically incorporated by reference in its entirety. Examples of agents that modulate the autophagy-related gene products listed in tables 1-4 can also be found in, for example, U.S. Patent Application Publication Numbers: US2009/0137572; US2009/0136475; US2009/0105149; US2009/0088401; US2009/0087454; US2009/0087410; US2009/0075900; US2009/0074774; US2009/0074711; US2009/0074676; US2009/0069245; US2009/0068194; US2009/0068168; US2009/0060898; US2009/0047240; US2009/0042803; US2009/0029992; US2009/0011994; US2009/0005431; US2009/0005309; US2009/0004194; US2008/0319026; US2008/0312247; US2008/0300316; US2008/0300180; US2008/0299138; US2008/0280991; US2008/0280886; US2008/0268071; US2008/0262086; US2008/0255200; US2008/0255084; US2008/0255036; US2008/0242687; US2008/0241289; US2008/0234284; US2008/0234257; US2008/0221132; US2008/0194672; US2008/0194555; US2008/0187490; US2008/0171769; US2008/0167312; US2008/0146573; US2008/0132555; US2008/0125386; US2008/0124379; US2008/0103189; US2008/0051465; US2008/0051383; US2008/0045588; US2008/0045561; US2008/0045558; US2008/0039473; US2008/0033056; US2008/0021036; US2008/0021029; US2008/0004300; US2007/0293525; US2007/0293494; US2007/0287734; US2007/0286853; US2007/0281965; US2007/0281894; US2007/0280886; US2007/0274981; US2007/0259891; US2007/0259827; US2007/0254877; US2007/0249519; US2007/0248605; US2007/0219235; US2007/0219114; US2007/0203064; US2007/0173440; US2007/0155820; US2007/0149622; US2007/0149580; US2007/0134273; US2007/0129389; US2007/0112031; US2007/0099964; US2007/0099952; US2007/0098716; US2007/0093480; US2007/0082929; US2007/0004765; US2007/0004654; US2006/0286102; US2006/0276381; US2006/0265767; US2006/0263368; US2006/0257867; US2006/0223742; US2006/0211752; US2006/0199796; US2006/0194821; US2006/0166871; US2006/0147456; US2006/0134128; US2006/0115475; US2006/0110746; US2006/0058255; US2006/0025566; US2006/0009454; US2006/0009452; US2006/0002866; US2005/0288316; US2005/0288243; US2005/0250719; US2005/0249751; US2005/0246794; US2005/0227921; US2005/0222171; US2005/0197341; US2005/0187237; US2005/0182006; US2005/0175581; US2005/0171182; US2005/0164298; US2005/0153955; US2005/0153878; US2005/0148511; US2005/0143381; US2005/0119273; US2005/0106142; US2005/0096363; US2005/0070493; US2005/0043233; US2005/0043221; US2005/0038049; US2005/0015263; US2005/0009870; US2004/0266777; US2004/0261190; US2004/0248965; US2004/0248884; US2004/0242559; US2004/0241797; US2004/0229250; US2004/0220270; US2004/0204368; US2004/0192629; US2004/0186157; US2004/0132648; US2004/0091919; US2004/0072836; US2004/0063708; US2004/0063707; US2004/0057950; US2003/0225098; US2003/0220246; US2003/0211967; US2003/0199525; US2003/0187001; US2003/0186844; US2003/0166574; US2003/0166573; US2003/0166001; US2003/0153752; US2003/0077298; US2003/0069430; US2003/0059455; US2003/0040612; US2009/0099069; US2008/0312413; US2008/0280845; US2008/0248462; US2008/0248462; US2008/0213250; US2008/0145313; US2008/0021080; US2008/0021036; US2008/0004309; US2007/0298124; US2007/0298104; US2007/0281986; US2007/0264195; US2007/0232556; US2007/0190149; US2007/0111934; US2007/0071675; US2007/0021360; US2007/0010658; US2006/0235034; US2006/0233799; US2006/0160737; US2006/0128696; US2006/0121042; US2006/0039904; US2006/0019882; US2005/0272655; US2005/0197293; US2004/0247592; US2004/0204356; US2004/0132023; US2004/0116669; US2004/0072836; US2004/0048895; US2004/0022765; US2003/0165485; US2003/0162964; US2003/0153503; US2003/0125276; US2003/0114657; US2003/0091569; US2003/0078199; US2002/0137095; US2001/0006793; US2001/0002393; US2002/0183319; and US2002/0156081, each of which is hereby specifically incorporated by reference in its entirety.

### 4. OLIGONUCLEOTIDE INHIBITORS OF AUTOPHAGY-RELATED GENE PRODUCTS

[0132] In certain embodiments of the present invention, oligonucleotide inhibitors of autophagy-related RNA gene products are used to modulate autophagy and to treat autophagy-related diseases. Oligonucleotide inhibitors include, but are not limited to, antisense molecules, siRNA molecules, shRNA molecules, ribozymes and triplex molecules. Such molecules are known in the art and the skilled artisan would be able to create oligonucleotide inhibitors for any of the autophagy-related genes of the invention using routine methods.

[0133] Antisense molecules, siRNA or shRNA molecules, ribozymes or triplex molecules may be contacted with a cell or administered to an organism. Alternatively, constructs encoding such molecules may be contacted with or introduced into a cell or organism. Antisense constructs, antisense oligonucleotides, RNA interference constructs or siRNA duplex RNA molecules can be used to interfere with expression of a protein of interest, e.g., an autophagy-related gene of the present invention. Typically at least 15, 17, 19, or 21 nucleotides of the complement of the mRNA sequence are sufficient for an antisense molecule. Typically at least 15, 19, 21, 22, or 23 nucleotides of a target sequence are sufficient for an RNA interference molecule. In some embodiments, an RNA interference molecule will have a 2 nucleotide 3′ overhang. If the RNA interference molecule is expressed in a cell from a construct, for example from a hairpin molecule or from an inverted repeat of the desired autophagy-related gene sequence, then the endogenous cellular machinery may create the overhangs. siRNA molecules can be prepared by chemical synthesis, in vitro transcription, or digestion of long dsRNA by Rnase III or Dicer. These can be introduced into cells by transfection, electroporation, intracellular infection or other methods known in the art. See, for example: Hannon, G J, 2002, RNA Interference, Nature 418: 244-251; Bernstein E et al., 2002, The rest is silence. RNA 7: 1509-1521; Hutvagner G et al., RNAi: Nature abhors a double-strand. Cur. Open. Genetics & Development 12: 225-232; Brummelkamp, 2002, A system for stable expression of short interfering RNAs in mammalian cells. Science 296: 550-553; Lee N S, Dohjima T, Bauer G, Li H, Li M-J, Ehsani A, Salvaterra P, and Rossi J. (2002). Expression of small interfering RNAs targeted against HIV-1 rev transcripts in human cells. Nature Biotechnol. 20:500-505; Miyagishi M, and Taira K. (2002). U6-promoter-driven siRNAs with four uridine 3′ overhangs efficiently suppress targeted gene expression in mammalian cells. Nature Biotechnol. 20:497-500; Paddison P J, Caudy A A, Bernstein E, Hannon G J, and Conklin D S. (2002). Short hairpin RNAs (shRNAs) induce sequence-specific silencing in mammalian cells. Genes & Dev. 16:948-958; Paul C P, Good P D, Winer I, and Engelke D R. (2002). Effective expression of small interfering RNA in human cells. Nature Biotechnol. 20:505-508; Sui G, Soohoo C, Affar E-B, Gay F, Shi Y, Forrester W C, and Shi Y. (2002). A DNA vector-based RNAi technology to suppress gene expression in mammalian cells. Proc. Natl. Acad. Sci. USA 99(6):5515-5520; Yu J-Y, DeRuiter S L, and Turner D L. (2002). RNA interference by expression of short-interfering RNAs and hairpin RNAs in mammalian cells. Proc. Natl. Acad. Sci. USA 99(9):6047-6052, PCT publications WO2006/066048 and WO2009/029688, US published application US2009/0123426, each of which is incorporated by reference in its entirety.

[0134] Antisense or RNA interference molecules can be delivered in vitro to cells or in vivo, e.g., to tumors or diseased tissues of a mammal Typical delivery means known in the art can be used. For example, delivery to a tumor can be accomplished by intratumoral injections. Other modes of delivery can be used without limitation, including: intravenous, intramuscular, intraperitoneal, intraarterial, local delivery during surgery, endoscopic, subcutaneous, and per os. Vectors can be selected for desirable properties for any particular application. Vectors can be viral, bacterial or plasmid. Adenoviral vectors are useful in this regard. Tissue-specific, cell-type specific, or otherwise regulatable promoters can be used to control the transcription of the inhibitory polynucleotide molecules. Non-viral carriers such as liposomes or nanospheres can also be used.

[0135] In the present methods, a RNA interference molecule or an RNA interference encoding oligonucleotide can be administered to the subject, for example, as naked RNA, in combination with a delivery reagent, and/or as a nucleic acid comprising sequences that express the siRNA or shRNA molecules. In some embodiments the nucleic acid comprising sequences that express the siRNA or shRNA molecules are delivered within vectors, e.g. plasmid, viral and bacterial vectors. Any nucleic acid delivery method known in the art can be used in the present invention. Suitable delivery reagents include, but are not limited to, e.g, the Mims TRANSIT-TKO® lipophilic reagent; LIPOFECTIN® transfection reagent; LIPOFECTAMINE® transfection reagent; cellfectin; polycations (e.g., polylysine), atelocollagen, nanoplexes and liposomes.

[0136] The use of atelocollagen as a delivery vehicle for nucleic acid molecules is described in Minakuchi et al. Nucleic Acids Res., 32(13):e109 (2004); Hanai et al. Ann NY Acad. Sci., 1082:9-17 (2006); and Kawata et al. Mol Cancer Ther., 7(9):2904-12 (2008); each of which is incorporated herein in their entirety.

[0137] In some embodiments of the invention, liposomes are used to deliver an inhibitory oligonucleotide to a subject. Liposomes suitable for use in the invention can be formed from standard vesicle-forming lipids, which generally include neutral or negatively charged phospholipids and a sterol, such as cholesterol. The selection of lipids is generally guided by consideration of factors such as the desired liposome size and half-life of the liposomes in the blood stream. A variety of methods are known for preparing liposomes, for example, as described in Szoka et al. (1980), Ann. Rev. Biophys. Bioeng. 9:467; and U.S. Pat. Nos. 4,235,871, 4,501,728, 4,837,028, and 5,019,369, the entire disclosures of which are herein incorporated by reference.

[0138] The liposomes for use in the present methods can comprise a ligand molecule that targets the liposome to cancer cells, pancreatic cells or neurons. Ligands which bind to receptors prevalent in cancer cells, pancreatic cells or neurons, such as monoclonal antibodies that bind to cell-type specific antigens, are preferred.

[0139] The liposomes for use in the present methods can also be modified so as to avoid clearance by the mononuclear macrophage system (“MMS”) and reticuloendothelial system (“RES”). Such modified liposomes have opsonization-inhibition moieties on the surface or incorporated into the liposome structure. In an embodiment, a liposome of the invention can comprise both opsonization-inhibition moieties and a ligand.

[0140] Opsonization-inhibiting moieties for use in preparing the liposomes of the invention are typically large hydrophilic polymers that are bound to the liposome membrane. As used herein, an opsonization inhibiting moiety is “bound” to a liposome membrane when it is chemically or physically attached to the membrane, e.g., by the intercalation of a lipid-soluble anchor into the membrane itself, or by binding directly to active groups of membrane lipids. These opsonization-inhibiting hydrophilic polymers form a protective surface layer that significantly decreases the uptake of the liposomes by the MMS and RES; e.g., as described in U.S. Pat. No. 4,920,016, the entire disclosure of which is herein incorporated by reference.

[0141] Opsonization inhibiting moieties suitable for modifying liposomes are preferably water-soluble polymers with a number-average molecular weight from about 500 to about 40,000 daltons, and more preferably from about 2,000 to about 20,000 daltons. Such polymers include polyethylene glycol (PEG) or polypropylene glycol (PPG) derivatives; e.g., methoxy PEG or PPG, and PEG or PPG stearate; synthetic polymers such as polyacrylamide or poly N-vinyl pyrrolidone; linear, branched, or dendrimeric polyamidoamines; polyacrylic acids; polyalcohols, e.g., polyvinylalcohol and polyxylitol to which carboxylic or amino groups are chemically linked, as well as gangliosides, such as ganglioside GM1. Copolymers of PEG, methoxy PEG, or methoxy PPG, or derivatives thereof, are also suitable. In addition, the opsonization inhibiting polymer can be a block copolymer of PEG and either a polyamino acid, polysaccharide, polyamidoamine, polyethyleneamine, or polynucleotide. The opsonization inhibiting polymers can also be natural polysaccharides containing amino acids or carboxylic acids, e.g., galacturonic acid, glucuronic acid, mannuronic acid, hyaluronic acid, pectic acid, neuraminic acid, alginic acid, carrageenan; aminated polysaccharides or oligosaccharides (linear or branched); or carboxylated polysaccharides or oligosaccharides, e.g., reacted with derivatives of carbonic acids with resultant linking of carboxylic groups. Preferably, the opsonization-inhibiting moiety is a PEG, PPG, or derivatives thereof. Liposomes modified with PEG or PEG-derivatives are sometimes called “PEGylated liposomes.”

[0142] The opsonization inhibiting moiety can be bound to the liposome membrane by any one of numerous well-known techniques. For example, an N-hydroxysuccinimide ester of PEG can be bound to a phosphatidyl-ethanolamine lipid-soluble anchor, and then bound to a membrane. Similarly, a dextran polymer can be derivatized with a stearylamine lipid-soluble anchor via reductive amination using Na(CN)BH₃ and a solvent mixture, such as tetrahydrofuran and water in a 30:12 ratio at 60° C.

[0143] Liposomes modified with opsonization-inhibition moieties remain in the circulation much longer than unmodified liposomes. For this reason, such liposomes are sometimes called “stealth” liposomes. Stealth liposomes are known to accumulate in tissues fed by porous or “leaky” microvasculature. Thus, tissue characterized by such microvasculature defects, for example solid tumors, will efficiently accumulate these liposomes; see Gabizon, et al. (1988), Proc. Natl. Acad. Sci., USA, 18:6949-53. In addition, the reduced uptake by the RES lowers the toxicity of stealth liposomes by preventing significant accumulation of the liposomes in the liver and spleen.

### 5. ANTIBODIES SPECIFIC FOR AUTOPHAGY-RELATED GENE PRODUCTS

[0144] Because of their ability to bind to a particular target with high specificity, antibodies specific for polypeptide autophagy-related gene products are able to either inhibit or enhance the activities of such gene products and thereby inhibit or enhance autophagy. For example, in some embodiments, an antibody specific for a receptor can inhibit the activity of the receptor by blocking its interaction with an activating ligand. Likewise, antibodies specific for a soluble ligand (e.g. a cytokine or growth factor) or a membrane-bound ligand can inhibit the activity of a receptor that is capable of binding to the ligand by inhibiting the binding of the ligand to the receptor. In other embodiments, antibodies specific for a receptor can be used to cross-link and thereby activate the receptor. Though antibodies are particularly useful in inhibiting or enhancing the activity extracellular proteins (e.g., receptors and/or ligands), the use of intracellular antibodies to inhibit protein function in a cell is also known in the art (see e.g., Carlson, J. R. (1988) Mol. Cell. Biol. 8:2638-2646; Biocca, S. et al. (1990) EMBO J. 9:101-108; Werge, T. M. et al. (1990) FEBS Lett. 274:193-198; Carlson, J. R. (1993) Proc. Natl. Acad. Sci. USA 90:7427-7428; Marasco, W. A. et al. (1993) Proc. Natl. Acad. Sci. USA 90:7889-7893; Biocca, S. et al. (1994) Biotechnology (NY) 12:396-399; Chen, S-Y. et al. (1994) Hum. Gene Ther. 5:595-601; Duan, L et al. (1994) Proc. Natl. Acad. Sci. USA 91:5075-5079; Chen, S-Y. et al. (1994) Proc. Natl. Acad. Sci. USA 91:5932-5936; Beerli, R. R. et al. (1994) J. Biol. Chem. 269:23931-23936; Beerli, R. R. et al. (1994) Biochem. Biophys. Res. Commun. 204:666-672; Mhashilkar, A. M. et al. (1995) EMBO J. 14:1542-1551; Richardson, J. H. et al. (1995) Proc. Natl. Acad. Sci. USA 92:3137-3141; PCT Publication No. WO 94/02610 by Marasco et al.; and PCT Publication No. WO 95/03832 by Duan et al.). Therefore, antibodies specific for peptide products of autophagy-related genes are useful as biological agents for the methods of the present invention.

[0145] Antibodies that specifically bind to a peptide product of an autophagy-related gene can be produced using a variety of known techniques, such as the standard somatic cell hybridization technique described by Kohler and Milstein, Nature 256: 495 (1975). Additionally, other techniques for producing monoclonal antibodies known in the art can also be employed, e.g., viral or oncogenic transformation of B lymphocytes, phage display technique using libraries of human antibody genes.

[0146] Polyclonal antibodies can be prepared by immunizing a suitable subject with a polypeptide immunogen. The polypeptide antibody titer in the immunized subject can be monitored over time by standard techniques, such as with an enzyme linked immunosorbent assay (ELISA) using immobilized polypeptide. If desired, the antibody directed against the antigen can be isolated from the mammal (e.g., from the blood) and further purified by well known techniques, such as protein A chromatography to obtain the IgG fraction. At an appropriate time after immunization, e.g., when the antibody titers are highest, antibody-producing cells can be obtained from the subject and used to prepare monoclonal antibodies.

[0147] Any of the many well known protocols used for fusing lymphocytes and immortalized cell lines can be applied for the purpose of generating monoclonal antibodies specific against the products of autophagy-related genes (see, e.g., Galfre, G. et al. (1977) Nature 266:55052; Gefter et al. (1977) supra; Lerner (1981) supra; Kenneth (1980) supra). Moreover, the ordinary skilled worker will appreciate that there are many variations of such methods which also would be useful. Typically, an immortal cell line (e.g., a myeloma cell line) is derived from the same mammalian species as the lymphocytes. For example, murine hybridomas can be made by fusing lymphocytes from a mouse immunized with an immunogenic preparation of the present invention with an immortalized mouse cell line. An example of an appropriate mouse cell lines are mouse myeloma cell lines that are sensitive to culture medium containing hypoxanthine, aminopterin and thymidine (“HAT medium”). Any of a number of myeloma cell lines can be used as a fusion partner according to standard techniques, e.g., the P3-NS1/1-Ag4-1, P3-x63-Ag8.653 or Sp2/O—Ag14 myeloma lines. These myeloma lines are available from the American Type Culture Collection (ATCC), Rockville, Md. Typically, HAT-sensitive mouse myeloma cells are fused to mouse splenocytes using polyethylene glycol (“PEG”). Hybridoma cells resulting from the fusion are then selected using HAT medium, which kills unfused and unproductively fused myeloma cells (unfused splenocytes die after several days because they are not transformed). Hybridoma cells producing a monoclonal antibody of the invention are detected by screening the hybridoma culture supernatants for antibodies that bind a given polypeptide, e.g., using a standard ELISA assay.

[0148] As an alternative to preparing monoclonal antibody-secreting hybridomas, a monoclonal antibody specific for one of the above described autophagy-related gene products can be identified and isolated by screening a recombinant combinatorial immunoglobulin library (e.g., an antibody phage or yeast display library) with the appropriate autophagy-related gene product to thereby isolate immunoglobulin library members that bind the autophagy-related gene product. Kits for generating and screening phage display libraries are commercially available (e.g., the Pharmacia Recombinant Phage Antibody System, Catalog No. 27-9400-01; and the Stratagene SurfZAP™ Phage Display Kit, Catalog No. 240612), and methods for screening phage and yeast display libraries are known in the art. Examples of methods and reagents particularly amenable for use in generating and screening an antibody display library can be found in, for example, Ladner et al. U.S. Pat. No. 5,223,409; Kang et al. International Publication No. WO 92/18619; Dower et al. International Publication No. WO 91/17271; Winter et al. International Publication WO 92/20791; Markland et al. International Publication No. WO 92/15679; Breitling et al. International Publication WO 93/01288; McCafferty et al. International Publication No. WO 92/01047; Garrard et al. International Publication No. WO 92/09690; Ladner et al. International Publication No. WO 90/02809; Fuchs et al. (1991) Biotechnology (NY) 9:1369-1372; Hay et al. (1992) Hum. Antibod. Hybridomas 3:81-85; Huse et al. (1989) Science 246:1275-1281; Griffiths et al. (1993) EMBO J. 12:725-734; Hawkins et al. (1992) J. Mol. Biol. 226:889-896; Clarkson et al. (1991) Nature 352:624-628; Gram et al. (1992) Proc. Natl. Acad. Sci. USA 89:3576-3580; Garrard et al. (1991) Biotechnology (NY) 9:1373-1377; Hoogenboom et al. (1991) Nucleic Acids Res. 19:4133-4137; Barbas et al. (1991) Proc. Natl. Acad. Sci. USA 88:7978-7982; and McCafferty et al. (1990) Nature 348:552-554.

[0149] In addition, chimeric and humanized antibodies against autophagy-related gene products can be made according to standard protocols such as those disclosed in U.S. Pat. No. 5,565,332. In another embodiment, antibody chains or specific binding pair members can be produced by recombination between vectors comprising nucleic acid molecules encoding a fusion of a polypeptide chain of a specific binding pair member and a component of a replicable generic display package and vectors containing nucleic acid molecules encoding a second polypeptide chain of a single binding pair member using techniques known in the art, e.g., as described in U.S. Pat. No. 5,565,332, 5,871,907, or 5,733,743.

[0150] In another embodiment, human monoclonal antibodies directed against autophagy-related gene product can be generated using transgenic or transchromosomal mice carrying parts of the human immune system rather than the mouse system. In one embodiment, transgenic mice, referred to herein as “humanized mice,” which contain a human immunoglobulin gene miniloci that encodes unrearranged human heavy and light chain variable region immunoglobulin sequences, together with targeted mutations that inactivate or delete the endogenous μ and κ chain loci (Lonberg, N. et al. (1994) Nature 368(6474): 856 859). The mice may also contain human heavy chain constant region immunoglobulin sequences. Accordingly, the mice express little or no mouse IgM or κ, and in response to immunization, the introduced human heavy and light chain variable region transgenes undergo class switching and somatic mutation to generate high affinity human variable region antibodies (Lonberg, N. et al. (1994), supra; reviewed in Lonberg, N. (1994) Handbook of Experimental Pharmacology 113:49 101; Lonberg, N. and Huszar, D. (1995) Intern. Rev. Immunol. Vol. 13: 65 93, and Harding, F. and Lonberg, N. (1995) Ann. N.Y. Acad. Sci. 764:536 546). These mice can be used to generate fully human monoclonal antibodies using the techniques described above or any other technique known in the art. The preparation of humanized mice is described in Taylor, L. et al. (1992) Nucleic Acids Research 20:6287 6295; Chen, J. et al. (1993) International Immunology 5: 647 656; Tuaillon et al. (1993) Proc. Natl. Acad. Sci. USA 90:3720 3724; Choi et al. (1993) Nature Genetics 4:117 123; Chen, J. et al. (1993) EMBO J. 12: 821 830; Tuaillon et al. (1994) J. Immunol. 152:2912 2920; Lonberg et al., (1994) Nature 368(6474): 856 859; Lonberg, N. (1994) Handbook of Experimental Pharmacology 113:49 101; Taylor, L. et al. (1994) International Immunology 6: 579 591; Lonberg, N. and Huszar, D. (1995) Intern. Rev. Immunol. Vol. 13: 65 93; Harding, F. and Lonberg, N. (1995) Ann. N.Y. Acad. Sci. 764:536 546; Fishwild, D. et al. (1996) Nature Biotechnology 14: 845 851. See further, U.S. Pat. Nos. 5,545,806; 5,569,825; 5,625,126; 5,633,425; 5,789,650; 5,877,397; 5,661,016; 5,814,318; 5,874,299; and 5,770,429; all to Lonberg and Kay, and GenPharm International; U.S. Pat. No. 5,545,807 to Surani et al.

### 6. PHARMACEUTICAL COMPOSITIONS

[0151] The invention provides pharmaceutical compositions comprising modulators of autophagy-related gene products. In one aspect, the present invention provides pharmaceutically acceptable compositions which comprise a therapeutically-effective amount of one or more of the agents described above, formulated together with one or more pharmaceutically acceptable carriers (additives) and/or diluents. In another aspect, the agents of the invention can be administered as such, or administered in mixtures with pharmaceutically acceptable carriers and can also be administered in conjunction with other agents. Conjunctive therapy thus includes sequential, simultaneous and separate, or co-administration of one or more agent of the invention, wherein the therapeutic effects of the first administered has not entirely disappeared when the subsequent compound is administered.

[0152] As described in detail below, the pharmaceutical compositions of the present invention may be specially formulated for administration in solid or liquid form, including those adapted for the following: (1) oral administration, for example, drenches (aqueous or non-aqueous solutions or suspensions), tablets, e.g., those targeted for buccal, sublingual, and systemic absorption, boluses, powders, granules, pastes for application to the tongue; (2) parenteral administration, for example, by subcutaneous, intramuscular, intravenous or epidural injection as, for example, a sterile solution or suspension, or sustained-release formulation; (3) topical application, for example, as a cream, ointment, or a controlled-release patch or spray applied to the skin; (4) intravaginally or intrarectally, for example, as a pessary, cream or foam; (5) sublingually; (6) ocularly; (7) transdermally; or (8) nasally.

[0153] As set out above, in certain embodiments, agents of the invention may be compounds containing a basic functional group, such as amino or alkylamino, and are, thus, capable of forming pharmaceutically-acceptable salts with pharmaceutically-acceptable acids. These salts can be prepared in situ in the administration vehicle or the dosage form manufacturing process, or through a separate reaction of a purified compound of the invention in its free base form with a suitable organic or inorganic acid, and isolating the salt thus formed during subsequent purification. Representative salts include the hydrobromide, hydrochloride, sulfate, bisulfate, phosphate, nitrate, acetate, valerate, oleate, palmitate, stearate, laurate, benzoate, lactate, phosphate, tosylate, citrate, maleate, fumarate, succinate, tartrate, napthylate, mesylate, glucoheptonate, lactobionate, and laurylsulphonate salts and the like (see, for example, Berge et al. (1977) “Pharmaceutical Salts”, J. Pharm. Sci. 66:1-19).

[0154] The pharmaceutically acceptable salts of the subject compounds include the conventional nontoxic salts or quaternary ammonium salts of the compounds, e.g., from non-toxic organic or inorganic acids. For example, such conventional nontoxic salts include those derived from inorganic acids such as hydrochloride, hydrobromic, sulfuric, sulfamic, phosphoric, nitric, and the like; and the salts prepared from organic acids such as acetic, propionic, succinic, glycolic, stearic, lactic, malic, tartaric, citric, ascorbic, palmitic, maleic, hydroxymaleic, phenylacetic, glutamic, benzoic, salicyclic, sulfanilic, 2-acetoxybenzoic, fumaric, toluenesulfonic, methanesulfonic, ethane disulfonic, oxalic, isothionic, and the like.

[0155] In other cases, the agents of the present invention may be compounds containing one or more acidic functional groups and, thus, are capable of forming pharmaceutically-acceptable salts with pharmaceutically-acceptable bases. These salts can likewise be prepared in situ in the administration vehicle or the dosage form manufacturing process, or by separately reacting the purified compound in its free acid form with a suitable base, such as the hydroxide, carbonate or bicarbonate of a pharmaceutically-acceptable metal cation, with ammonia, or with a pharmaceutically-acceptable organic primary, secondary or tertiary amine Representative alkali or alkaline earth salts include the lithium, sodium, potassium, calcium, magnesium, and aluminum salts and the like. Representative organic amines useful for the formation of base addition salts include ethylamine, diethylamine, ethylenediamine, ethanolamine, diethanolamine, piperazine and the like (see, for example, Berge et al., supra).

[0156] Wetting agents, emulsifiers and lubricants, such as sodium lauryl sulfate and magnesium stearate, as well as coloring agents, release agents, coating agents, sweetening, flavoring and perfuming agents, preservatives and antioxidants can also be present in the compositions.

[0157] Examples of pharmaceutically-acceptable antioxidants include: (1) water soluble antioxidants, such as ascorbic acid, cysteine hydrochloride, sodium bisulfate, sodium metabisulfite, sodium sulfite and the like; (2) oil-soluble antioxidants, such as ascorbyl palmitate, butylated hydroxyanisole (BHA), butylated hydroxytoluene (BHT), lecithin, propyl gallate, alpha-tocopherol, and the like; and (3) metal chelating agents, such as citric acid, ethylenediamine tetraacetic acid (EDTA), sorbitol, tartaric acid, phosphoric acid, and the like.

[0158] The formulations of the agents of the invention may be presented in unit dosage form and may be prepared by any methods well known in the art of pharmacy. The amount of active ingredient which can be combined with a carrier material to produce a single dosage form will vary depending upon the host being treated and the particular mode of administration. The amount of active ingredient which can be combined with a carrier material to produce a single dosage form will generally be that amount of the agent which produces a therapeutic effect.

[0159] In certain embodiments, a formulation of the present invention comprises an excipient, including, but not limited to, cyclodextrins, liposomes, micelle forming agents, e.g., bile acids, and polymeric carriers, e.g., polyesters and polyanhydrides; and an agent of the present invention. In certain embodiments, an aforementioned formulation renders orally bioavailable a agent of the present invention.

[0160] Methods of preparing these formulations or compositions may include the step of bringing into association an agent of the present invention with the carrier and, optionally, one or more accessory ingredients.

[0161] Liquid dosage forms for oral administration of the compounds of the invention include pharmaceutically acceptable emulsions, microemulsions, solutions, suspensions, syrups and elixirs. In addition to the active ingredient, the liquid dosage forms may contain inert diluents commonly used in the art, such as, for example, water or other solvents, solubilizing agents and emulsifiers, such as ethyl alcohol, isopropyl alcohol, ethyl carbonate, ethyl acetate, benzyl alcohol, benzyl benzoate, propylene glycol, 1,3-butylene glycol, oils (in particular, cottonseed, groundnut, corn, germ, olive, castor and sesame oils), glycerol, tetrahydrofuryl alcohol, polyethylene glycols and fatty acid esters of sorbitan, and mixtures thereof.

[0162] Besides inert diluents, the oral compositions can also include adjuvants such as wetting agents, emulsifying and suspending agents, sweetening, flavoring, coloring, perfuming and preservative agents.

[0163] Suspensions, in addition to the active compounds, may contain suspending agents as, for example, ethoxylated isostearyl alcohols, polyoxyethylene sorbitol and sorbitan esters, microcrystalline cellulose, aluminum metahydroxide, bentonite, agar-agar and tragacanth, and mixtures thereof.

[0164] Formulations of the invention suitable for oral administration may be in the form of capsules, cachets, pills, tablets, lozenges (using a flavored basis, usually sucrose and acacia or tragacanth), powders, granules, or as a solution or a suspension in an aqueous or non-aqueous liquid, or as an oil-in-water or water-in-oil liquid emulsion, or as an elixir or syrup, or as pastilles (using an inert base, such as gelatin and glycerin, or sucrose and acacia) and/or as mouth washes and the like, each containing a predetermined amount of a compound of the present invention as an active ingredient. A compound of the present invention may also be administered as a bolus, electuary or paste.

[0165] In solid dosage forms of the invention for oral administration (capsules, tablets, pills, dragees, powders, granules and the like), the active ingredient is mixed with one or more pharmaceutically-acceptable carriers, such as sodium citrate or dicalcium phosphate, and/or any of the following: (1) fillers or extenders, such as starches, lactose, sucrose, glucose, mannitol, and/or silicic acid; (2) binders, such as, for example, carboxymethylcellulose, alginates, gelatin, polyvinyl pyrrolidone, sucrose and/or acacia; (3) humectants, such as glycerol; (4) disintegrating agents, such as agar-agar, calcium carbonate, potato or tapioca starch, alginic acid, certain silicates, and sodium carbonate; (5) solution retarding agents, such as paraffin; (6) absorption accelerators, such as quaternary ammonium compounds; (7) wetting agents, such as, for example, cetyl alcohol, glycerol monostearate, and non-ionic surfactants; (8) absorbents, such as kaolin and bentonite clay; (9) lubricants, such a talc, calcium stearate, magnesium stearate, solid polyethylene glycols, sodium lauryl sulfate, and mixtures thereof; and (10) coloring agents. In the case of capsules, tablets and pills, the pharmaceutical compositions may also comprise buffering agents. Solid compositions of a similar type may also be employed as fillers in soft and hard-shelled gelatin capsules using such excipients as lactose or milk sugars, as well as high molecular weight polyethylene glycols and the like.

[0166] A tablet may be made by compression or molding, optionally with one or more accessory ingredients. Compressed tablets may be prepared using binder (for example, gelatin or hydroxypropylmethyl cellulose), lubricant, inert diluent, preservative, disintegrant (for example, sodium starch glycolate or cross-linked sodium carboxymethyl cellulose), surface-active or dispersing agent. Molded tablets may be made by molding in a suitable machine a mixture of the powdered compound moistened with an inert liquid diluent.

[0167] The tablets, and other solid dosage forms of the pharmaceutical compositions of the present invention, such as dragees, capsules, pills and granules, may optionally be scored or prepared with coatings and shells, such as enteric coatings and other coatings well known in the pharmaceutical-formulating art. They may also be formulated so as to provide slow or controlled release of the active ingredient therein using, for example, hydroxypropylmethyl cellulose in varying proportions to provide the desired release profile, other polymer matrices, liposomes and/or microspheres. Compositions of the invention may also be formulated for rapid release, e.g., freeze-dried. They may be sterilized by, for example, filtration through a bacteria-retaining filter, or by incorporating sterilizing agents in the form of sterile solid compositions which can be dissolved in sterile water, or some other sterile injectable medium immediately before use. These compositions may also optionally contain opacifying agents and may be of a composition that they release the active ingredient(s) only, or preferentially, in a certain portion of the gastrointestinal tract, optionally, in a delayed manner. Examples of embedding compositions which can be used include polymeric substances and waxes. The active ingredient can also be in micro-encapsulated form, if appropriate, with one or more of the above-described excipients.

[0168] Formulations of the pharmaceutical compositions of the invention for rectal or vaginal administration may be presented as a suppository, which may be prepared by mixing one or more compounds of the invention with one or more suitable nonirritating excipients or carriers comprising, for example, cocoa butter, polyethylene glycol, a suppository wax or a salicylate, and which is solid at room temperature, but liquid at body temperature and, therefore, will melt in the rectum or vaginal cavity and release the active compound.

[0169] Formulations of the present invention which are suitable for vaginal administration also include pessaries, tampons, creams, gels, pastes, foams or spray formulations containing such carriers as are known in the art to be appropriate.

[0170] Dosage forms for the topical or transdermal administration of a compound of this invention include powders, sprays, ointments, pastes, creams, lotions, gels, solutions, patches and inhalants. The active compound may be mixed under sterile conditions with a pharmaceutically-acceptable carrier, and with any preservatives, buffers, or propellants which may be required.

[0171] The ointments, pastes, creams and gels may contain, in addition to an active compound of this invention, excipients, such as animal and vegetable fats, oils, waxes, paraffins, starch, tragacanth, cellulose derivatives, polyethylene glycols, silicones, bentonites, silicic acid, talc and zinc oxide, or mixtures thereof.

[0172] Powders and sprays can contain, in addition to a compound of this invention, excipients such as lactose, talc, silicic acid, aluminum hydroxide, calcium silicates and polyamide powder, or mixtures of these substances. Sprays can additionally contain customary propellants, such as chlorofluorohydrocarbons and volatile unsubstituted hydrocarbons, such as butane and propane.

[0173] Transdermal patches have the added advantage of providing controlled delivery of a compound of the present invention to the body. Such dosage forms can be made by dissolving or dispersing the compound in the proper medium. Absorption enhancers can also be used to increase the flux of the compound across the skin. The rate of such flux can be controlled by either providing a rate controlling membrane or dispersing the compound in a polymer matrix or gel.

[0174] Ophthalmic formulations, eye ointments, powders, solutions and the like, are also contemplated as being within the scope of this invention.

[0175] Pharmaceutical compositions of this invention suitable for parenteral administration comprise one or more compounds of the invention in combination with one or more pharmaceutically-acceptable sterile isotonic aqueous or nonaqueous solutions, dispersions, suspensions or emulsions, or sterile powders which may be reconstituted into sterile injectable solutions or dispersions just prior to use, which may contain sugars, alcohols, antioxidants, buffers, bacteriostats, solutes which render the formulation isotonic with the blood of the intended recipient or suspending or thickening agents.

[0176] Examples of suitable aqueous and nonaqueous carriers which may be employed in the pharmaceutical compositions of the invention include water, ethanol, polyols (such as glycerol, propylene glycol, polyethylene glycol, and the like), and suitable mixtures thereof, vegetable oils, such as olive oil, and injectable organic esters, such as ethyl oleate. Proper fluidity can be maintained, for example, by the use of coating materials, such as lecithin, by the maintenance of the required particle size in the case of dispersions, and by the use of surfactants.

[0177] In some cases, in order to prolong the effect of a drug, it is desirable to slow the absorption of the drug from subcutaneous or intramuscular injection. This may be accomplished by the use of a liquid suspension of crystalline or amorphous material having poor water solubility. The rate of absorption of the drug then depends upon its rate of dissolution which, in turn, may depend upon crystal size and crystalline form. Alternatively, delayed absorption of a parenterally-administered drug form is accomplished by dissolving or suspending the drug in an oil vehicle.

[0178] Injectable depot forms are made by forming microencapsule matrices of the subject compounds in biodegradable polymers such as polylactide-polyglycolide. Depending on the ratio of drug to polymer, and the nature of the particular polymer employed, the rate of drug release can be controlled. Examples of other biodegradable polymers include poly(orthoesters) and poly(anhydrides). Depot injectable formulations are also prepared by entrapping the drug in liposomes or microemulsions which are compatible with body tissue.

[0179] Exemplary formulations comprising agents of the invention are determined based on various properties including, but not limited to, chemical stability at body temperature, functional efficiency time of release, toxicity and optimal dose.

[0180] The preparations of the present invention may be given orally, parenterally, topically, or rectally. They are of course given in forms suitable for each administration route. For example, they are administered in tablets or capsule form, by injection, inhalation, eye lotion, ointment, suppository, administration by injection, infusion or inhalation; topical by lotion or ointment; and rectal by suppositories.

[0181] Regardless of the route of administration selected, the compounds of the present invention, which may be used in a suitable hydrated form, and/or the pharmaceutical compositions of the present invention, are formulated into pharmaceutically-acceptable dosage forms by conventional methods known to those of skill in the art.

[0182] In certain embodiments, the above-described pharmaceutical compositions comprise one or more of the agents of the invention, a chemotherapeutic agent, and optionally a pharmaceutically acceptable carrier.

[0183] The term chemotherapeutic agent includes, without limitation, platinum-based agents, such as carboplatin and cisplatin; nitrogen mustard alkylating agents; nitrosourea alkylating agents, such as carmustine (BCNU) and other alkylating agents; antimetabolites, such as methotrexate; purine analog antimetabolites; pyrimidine analog antimetabolites, such as fluorouracil (5-FU) and gemcitabine; hormonal antineoplastics, such as goserelin, leuprolide, and tamoxifen; natural antineoplastics, such as taxanes (e.g., docetaxel and paclitaxel), aldesleukin, interleukin-2, etoposide (VP-16), interferon α, and tretinoin (ATRA); antibiotic natural antineoplastics, such as bleomycin, dactinomycin, daunorubicin, doxorubicin, and mitomycin; and vinca alkaloid natural antineoplastics, such as vinblastine and vincristine.

[0184] Further, the following drugs may also be used in combination with a chemotherapetutic agent, even if not considered chemotherapeutic agents themselves: dactinomycin; daunorubicin HCl; docetaxel; doxorubicin HCl; epoetin α; etoposide (VP-16); ganciclovir sodium; gentamicin sulfate; interferon α; leuprolide acetate; meperidine HCl; methadone HCl; ranitidine HCl; vinblastin sulfate; and zidovudine (AZT). For example, fluorouracil has recently been formulated in conjunction with epinephrine and bovine collagen to form a particularly effective combination.

[0185] Still further, the following listing of amino acids, peptides, polypeptides, proteins, polysaccharides, and other large molecules may also be used: interleukins 1 through 18, including mutants and analogues; interferons or cytokines, such as interferons α, β, and γ; hormones, such as luteinizing hormone releasing hormone (LHRH) and analogues and, gonadotropin releasing hormone (GnRH); growth factors, such as transforming growth factor-β (TGF-β), fibroblast growth factor (FGF), nerve growth factor (NGF), growth hormone releasing factor (GHRF), epidermal growth factor (EGF), fibroblast growth factor homologous factor (FGFHF), hepatocyte growth factor (HGF), and insulin growth factor (IGF); tumor necrosis factor-α & β (TNF-α & β); invasion inhibiting factor-2 (IIF-2); bone morphogenetic proteins 1-7 (BMP 1-7); somatostatin; thymosin-α-1; γ-globulin; superoxide dismutase (SOD); complement factors; anti-angiogenesis factors; antigenic materials; and pro-drugs.

[0186] Chemotherapeutic agents for use with the compositions and methods of treatment described herein include, but are not limited to alkylating agents such as thiotepa and cyclosphosphamide; alkyl sulfonates such as busulfan, improsulfan and piposulfan; aziridines such as benzodopa, carboquone, meturedopa, and uredopa; ethylenimines and methylamelamines including altretamine, triethylenemelamine, trietylenephosphoramide, triethiylenethiophosphoramide and trimethylolomelamine; acetogenins (especially bullatacin and bullatacinone); a camptothecin (including the synthetic analogue topotecan); bryostatin; callystatin; CC-1065 (including its adozelesin, carzelesin and bizelesin synthetic analogues); cryptophycins (particularly cryptophycin 1 and cryptophycin 8); dolastatin; duocarmycin (including the synthetic analogues, KW-2189 and CB1-TM1); eleutherobin; pancratistatin; a sarcodictyin; spongistatin; nitrogen mustards such as chlorambucil, chlornaphazine, cholophosphamide, estramustine, ifosfamide, mechlorethamine, mechlorethamine oxide hydrochloride, melphalan, novembichin, phenesterine, prednimustine, trofosfamide, uracil mustard; nitrosureas such as carmustine, chlorozotocin, fotemustine, lomustine, nimustine, and ranimnustine; antibiotics such as the enediyne antibiotics (e.g., calicheamicin, especially calicheamicin gammalI and calicheamicin omegal1; dynemicin, including dynemicin A; bisphosphonates, such as clodronate; an esperamicin; as well as neocarzinostatin chromophore and related chromoprotein enediyne antiobiotic chromophores, aclacinomysins, actinomycin, authrarnycin, azaserine, bleomycins, cactinomycin, carabicin, caminomycin, carzinophilin, chromomycinis, dactinomycin, daunorubicin, detorubicin, 6-diazo-5-oxo-L-norleucine, doxorubicin (including morpholino-doxorubicin, cyanomorpholino-doxorubicin, 2-pyrrolino-doxorubicin and deoxydoxorubicin), epirubicin, esorubicin, idarubicin, marcellomycin, mitomycins such as mitomycin C, mycophenolic acid, nogalamycin, olivomycins, peplomycin, potfiromycin, puromycin, quelamycin, rodorubicin, streptonigrin, streptozocin, tubercidin, ubenimex, zinostatin, zorubicin; anti-metabolites such as methotrexate and 5-fluorouracil (5-FU); folic acid analogues such as denopterin, methotrexate, pteropterin, trimetrexate; purine analogs such as fludarabine, 6-mercaptopurine, thiamiprine, thioguanine; pyrimidine analogs such as ancitabine, azacitidine, 6-azauridine, carmofur, cytarabine, dideoxyuridine, doxifluridine, enocitabine, floxuridine; androgens such as calusterone, dromostanolone propionate, epitiostanol, mepitiostane, testolactone; anti-adrenals such as aminoglutethimide, mitotane, trilostane; folic acid replenisher such as frolinic acid; aceglatone; aldophosphamide glycoside; aminolevulinic acid; eniluracil; amsacrine; bestrabucil; bisantrene; edatraxate; defofamine; demecolcine; diaziquone; elformithine; elliptinium acetate; an epothilone; etoglucid; gallium nitrate; hydroxyurea; lentinan; lonidainine; maytansinoids such as maytansine and ansamitocins; mitoguazone; mitoxantrone; mopidanmol; nitraerine; pentostatin; phenamet; pirarubicin; losoxantrone; podophyllinic acid; 2-ethylhydrazide; procarbazine; PSK polysaccharide complex); razoxane; rhizoxin; sizofuran; spirogermanium; tenuazonic acid; triaziquone; 2,2′,2″-trichlorotriethylamine; trichothecenes (especially T-2 toxin, verracurin A, roridin A and anguidine); urethan; vindesine; dacarbazine; mannomustine; mitobronitol; mitolactol; pipobroman; gacytosine; arabinoside (“Ara-C”); cyclophosphamide; thiotepa; taxoids, e.g., paclitaxel and doxetaxel; chlorambucil; gemcitabine; 6-thioguanine; mercaptopurine; methotrexate; platinum coordination complexes such as cisplatin, oxaliplatin and carboplatin; vinblastine; platinum; etoposide (VP-16); ifosfamide; mitoxantrone; vincristine; vinorelbine; novantrone; teniposide; edatrexate; daunomycin; aminopterin; XELODA® (capecitabine); ibandronate; irinotecan (e.g., CPT-11); topoisomerase inhibitor RFS 2000; difluoromethylomithine (DMFO); retinoids such as retinoic acid; capecitabine; and pharmaceutically acceptable salts, acids or derivatives of any of the above.

[0187] In another embodiment, the composition of the invention may comprise other biologically active substances, including therapeutic drugs or pro-drugs, for example, other chemotherapeutic agents, scavenger compounds, antibiotics, anti-virals, anti-fungals, anti-inflammatories, vasoconstrictors and anticoagulants, antigens useful for cancer vaccine applications or corresponding pro-drugs.

[0188] Exemplary scavenger compounds include, but are not limited to thiol-containing compounds such as glutathione, thiourea, and cysteine; alcohols such as mannitol, substituted phenols; quinones, substituted phenols, aryl amines and nitro compounds.

[0189] Various forms of the chemotherapeutic agents and/or other biologically active agents may be used. These include, without limitation, such forms as uncharged molecules, molecular complexes, salts, ethers, esters, amides, and the like, which are biologically active.

### 7. THERAPEUTIC METHODS OF THE INVENTION

[0190] The present invention further provides novel therapeutic methods of treating autophagy-related diseases, including cancer, neurodegenerative diseases, liver diseases, muscle diseases and pancreatitis, comprising administering to a subject, (e.g., a subject in need thereof), an effective amount of a modulator of an autophagy-related gene product of the invention.

[0191] A subject in need thereof may include, for example, a subject who has been diagnosed with a tumor, including a pre-cancerous tumor, a cancer, or a subject who has been treated, including subjects that have been refractory to previous treatment.

[0192] Autophagy has been implicated as playing a role in the axonal degeneration that occurs following nerve injury. For example, traumatic spinal cord injury results in a rapid increase of itraaxonal calcium levels, which results in an increase in neuronal autophagy and cell death (Knoferle et al., (2009), PNAS, 107, 6064-6069). Inhibition of either calcium flux or autophagy attenuates axonal degeneration. Notably, a number of calcium binding proteins were identified in the autophagy modulator screen of the instant invention (Table 5). Thus, in certain embodiments the invention relates to the treatment or prevention of axonal degeneration following neural trauma through the modulation of calcium-binding autophagy modulating gene products or through the modulation of other autophagy-related gene products.

[0193] The methods of the present invention may be used to treat any cancerous or pre-cancerous tumor. Cancers that may treated by methods and compositions of the invention include, but are not limited to, cancer cells from the bladder, blood, bone, bone marrow, brain, breast, colon, esophagus, gastrointestine, gum, head, kidney, liver, lung, nasopharynx, neck, ovary, prostate, skin, stomach, testis, tongue, or uterus. In addition, the cancer may specifically be of the following histological type, though it is not limited to these: neoplasm, malignant; carcinoma; carcinoma, undifferentiated; giant and spindle cell carcinoma; small cell carcinoma; papillary carcinoma; squamous cell carcinoma; lymphoepithelial carcinoma; basal cell carcinoma; pilomatrix carcinoma; transitional cell carcinoma; papillary transitional cell carcinoma; adenocarcinoma; gastrinoma, malignant; cholangiocarcinoma; hepatocellular carcinoma; combined hepatocellular carcinoma and cholangiocarcinoma; trabecular adenocarcinoma; adenoid cystic carcinoma; adenocarcinoma in adenomatous polyp; adenocarcinoma, familial polyposis coli; solid carcinoma; carcinoid tumor, malignant; branchiolo-alveolar adenocarcinoma; papillary adenocarcinoma; chromophobe carcinoma; acidophil carcinoma; oxyphilic adenocarcinoma; basophil carcinoma; clear cell adenocarcinoma; granular cell carcinoma; follicular adenocarcinoma; papillary and follicular adenocarcinoma; nonencapsulating sclerosing carcinoma; adrenal cortical carcinoma; endometroid carcinoma; skin appendage carcinoma; apocrine adenocarcinoma; sebaceous adenocarcinoma; ceruminous adenocarcinoma; mucoepidermoid carcinoma; cystadenocarcinoma; papillary cystadenocarcinoma; papillary serous cystadenocarcinoma; mucinous cystadenocarcinoma; mucinous adenocarcinoma; signet ring cell carcinoma; infiltrating duct carcinoma; medullary carcinoma; lobular carcinoma; inflammatory carcinoma; paget's disease, mammary; acinar cell carcinoma; adenosquamous carcinoma; adenocarcinoma w/squamous metaplasia; thymoma, malignant; ovarian stromal tumor, malignant; thecoma, malignant; granulosa cell tumor, malignant; and roblastoma, malignant; sertoli cell carcinoma; leydig cell tumor, malignant; lipid cell tumor, malignant; paraganglioma, malignant; extra-mammary paraganglioma, malignant; pheochromocytoma; glomangiosarcoma; malignant melanoma; amelanotic melanoma; superficial spreading melanoma; malig melanoma in giant pigmented nevus; epithelioid cell melanoma; blue nevus, malignant; sarcoma; fibrosarcoma; fibrous histiocytoma, malignant; myxosarcoma; liposarcoma; leiomyosarcoma; rhabdomyosarcoma; embryonal rhabdomyosarcoma; alveolar rhabdomyosarcoma; stromal sarcoma; mixed tumor, malignant; mullerian mixed tumor; nephroblastoma; hepatoblastoma; carcinosarcoma; mesenchymoma, malignant; brenner tumor, malignant; phyllodes tumor, malignant; synovial sarcoma; mesothelioma, malignant; dysgerminoma; embryonal carcinoma; teratoma, malignant; struma ovarii, malignant; choriocarcinoma; mesonephroma, malignant; hemangiosarcoma; hemangioendothelioma, malignant; kaposi's sarcoma; hemangiopericytoma, malignant; lymphangiosarcoma; osteosarcoma; juxtacortical osteosarcoma; chondrosarcoma; chondroblastoma, malignant; mesenchymal chondrosarcoma; giant cell tumor of bone; ewing's sarcoma; odontogenic tumor, malignant; ameloblastic odontosarcoma; ameloblastoma, malignant; ameloblastic fibrosarcoma; pinealoma, malignant; chordoma; glioma, malignant; ependymoma; astrocytoma; protoplasmic astrocytoma; fibrillary astrocytoma; astroblastoma; glioblastoma; oligodendroglioma; oligodendroblastoma; primitive neuroectodermal; cerebellar sarcoma; ganglioneuroblastoma; neuroblastoma; retinoblastoma; olfactory neurogenic tumor; meningioma, malignant; neurofibrosarcoma; neurilemmoma, malignant; granular cell tumor, malignant; malignant lymphoma; Hodgkin's disease; Hodgkin's lymphoma; paragranuloma; malignant lymphoma, small lymphocytic; malignant lymphoma, large cell, diffuse; malignant lymphoma, follicular; mycosis fungoides; other specified non-Hodgkin's lymphomas; malignant histiocytosis; multiple myeloma; mast cell sarcoma; immunoproliferative small intestinal disease; leukemia; lymphoid leukemia; plasma cell leukemia; erythroleukemia; lymphosarcoma cell leukemia; myeloid leukemia; basophilic leukemia; eosinophilic leukemia; monocytic leukemia; mast cell leukemia; megakaryoblastic leukemia; myeloid sarcoma; and hairy cell leukemia.

[0194] In certain embodiments, the methods of the present invention include the treatment of cancer comprising the administration of an autophagy-inhibiting agent of the present invention in combination with a chemotherapeutic agent. Such autophagy-inhibiting agents include agents that inhibit the activity of products of autophagy-enhancing genes (Table 2) and agents that enhance the activity of the products of autophagy-inhibiting genes (Table 1). Any chemotherapeutic agent is suitable for use in the methods of the instant invention, particularly chemotherapeutic agents that that induce cellular stress in cancer cells. Chemotherapeutic agents useful in the instant invention include, but are not limited to, to alkylating agents such as thiotepa and cyclosphosphamide; alkyl sulfonates such as busulfan, improsulfan and piposulfan; aziridines such as benzodopa, carboquone, meturedopa, and uredopa; ethylenimines and methylamelamines including altretamine, triethylenemelamine, trietylenephosphoramide, triethiylenethiophosphoramide and trimethylolomelamine; acetogenins (especially bullatacin and bullatacinone); a camptothecin (including the synthetic analogue topotecan); bryostatin; callystatin; CC-1065 (including its adozelesin, carzelesin and bizelesin synthetic analogues); cryptophycins (particularly cryptophycin 1 and cryptophycin 8); dolastatin; duocarmycin (including the synthetic analogues, KW-2189 and CB1-TM1); eleutherobin; pancratistatin; a sarcodictyin; spongistatin; nitrogen mustards such as chlorambucil, chlornaphazine, cholophosphamide, estramustine, ifosfamide, mechlorethamine, mechlorethamine oxide hydrochloride, melphalan, novembichin, phenesterine, prednimustine, trofosfamide, uracil mustard; nitrosureas such as carmustine, chlorozotocin, fotemustine, lomustine, nimustine, and ranimnustine; antibiotics such as the enediyne antibiotics (e.g., calicheamicin, especially calicheamicin gammalI and calicheamicin omegal1; dynemicin, including dynemicin A; bisphosphonates, such as clodronate; an esperamicin; as well as neocarzinostatin chromophore and related chromoprotein enediyne antiobiotic chromophores, aclacinomysins, actinomycin, authrarnycin, azaserine, bleomycins, cactinomycin, carabicin, caminomycin, carzinophilin, chromomycinis, dactinomycin, daunorubicin, detorubicin, 6-diazo-5-oxo-L-norleucine, doxorubicin (including morpholino-doxorubicin, cyanomorpholino-doxorubicin, 2-pyrrolino-doxorubicin and deoxydoxorubicin), epirubicin, esorubicin, idarubicin, marcellomycin, mitomycins such as mitomycin C, mycophenolic acid, nogalamycin, olivomycins, peplomycin, potfiromycin, puromycin, quelamycin, rodorubicin, streptonigrin, streptozocin, tubercidin, ubenimex, zinostatin, zorubicin; anti-metabolites such as methotrexate and 5-fluorouracil (5-FU); folic acid analogues such as denopterin, methotrexate, pteropterin, trimetrexate; purine analogs such as fludarabine, 6-mercaptopurine, thiamiprine, thioguanine; pyrimidine analogs such as ancitabine, azacitidine, 6-azauridine, carmofur, cytarabine, dideoxyuridine, doxifluridine, enocitabine, floxuridine; androgens such as calusterone, dromostanolone propionate, epitiostanol, mepitiostane, testolactone; anti-adrenals such as aminoglutethimide, mitotane, trilostane; folic acid replenisher such as frolinic acid; aceglatone; aldophosphamide glycoside; aminolevulinic acid; eniluracil; amsacrine; bestrabucil; bisantrene; edatraxate; defofamine; demecolcine; diaziquone; elformithine; elliptinium acetate; an epothilone; etoglucid; gallium nitrate; hydroxyurea; lentinan; lonidainine; maytansinoids such as maytansine and ansamitocins; mitoguazone; mitoxantrone; mopidanmol; nitraerine; pentostatin; phenamet; pirarubicin; losoxantrone; podophyllinic acid; 2-ethylhydrazide; procarbazine; PSK polysaccharide complex); razoxane; rhizoxin; sizofuran; spirogermanium; tenuazonic acid; triaziquone; 2,2′,2″-trichlorotriethylamine; trichothecenes (especially T-2 toxin, verracurin A, roridin A and anguidine); urethan; vindesine; dacarbazine; mannomustine; mitobronitol; mitolactol; pipobroman; gacytosine; arabinoside (“Ara-C”); cyclophosphamide; thiotepa; taxoids, e.g., paclitaxel and doxetaxel; chlorambucil; gemcitabine; 6-thioguanine; mercaptopurine; methotrexate; platinum coordination complexes such as cisplatin, oxaliplatin and carboplatin; vinblastine; platinum; etoposide (VP-16); ifosfamide; mitoxantrone; vincristine; vinorelbine; novantrone; teniposide; edatrexate; daunomycin; aminopterin; XELODA® (capecitabine); ibandronate; irinotecan (e.g., CPT-11); topoisomerase inhibitor RFS 2000; difluoromethylomithine (DMFO); retinoids such as retinoic acid; capecitabine; and pharmaceutically acceptable salts, acids or derivatives of any of the above.

[0195] In certain embodiments, the methods of the present invention include the treatment of cancer comprising the administration of an autophagy-inhibiting agent of the present invention in combination with radiation therapy. An optimized dose of radiation therapy may be given to a subject as a daily dose. Optimized daily doses of radiation therapy may be, for example, from about 0.25 to 0.5 Gy, about 0.5 to 1.0 Gy, about 1.0 to 1.5 Gy, about 1.5 to 2.0 Gy, about 2.0 to 2.5 Gy, and about 2.5 to 3.0 Gy. An exemplary daily dose may be, for example, from about 2.0 to 3.0 Gy. A higher dose of radiation may be administered, for example, if a tumor is resistant to lower doses of radiation. High doses of radiation may reach, for example, 4 Gy. Further, the total dose of radiation administered over the course of treatment may, for example, range from about 50 to 200 Gy. In an exemplary embodiment, the total dose of radiation administered over the course of treatment ranges, for example, from about 50 to 80 Gy. In certain embodiments, a dose of radiation may be given over a time interval of, for example, 1, 2, 3, 4, or 5 minutes, wherein the amount of time is dependent on the dose rate of the radiation source.

[0196] In certain embodiments, a daily dose of optimized radiation may be administered, for example, 4 or 5 days a week, for approximately 4 to 8 weeks. In an alternate embodiment, a daily dose of optimized radiation may be administered daily seven days a week, for approximately 4 to 8 weeks. In certain embodiments, a daily dose of radiation may be given a single dose. Alternately, a daily dose of radiation may given as a plurality of doses. In a further embodiment, the optimized dose of radiation may be a higher dose of radiation than can be tolerated by the patient on a daily base. As such, high doses of radiation may be administered to a patient, but in a less frequent dosing regimen.

[0197] The types of radiation that may be used in cancer treatment are well known in the art and include electron beams, high-energy photons from a linear accelerator or from radioactive sources such as cobalt or cesium, protons, and neutrons. An exemplary ionizing radiation is an x-ray radiation.

[0198] Methods to administer radiation are well known in the art. Exemplary methods include, but are not limited to, external beam radiation, internal beam radiation, and radiopharmaceuticals. In external beam radiation, a linear accelerator is used to deliver high-energy x-rays to the area of the body affected by cancer. Since the source of radiation originates outside of the body, external beam radiation can be used to treat large areas of the body with a uniform dose of radiation. Internal radiation therapy, also known as brachytherapy, involves delivery of a high dose of radiation to a specific site in the body. The two main types of internal radiation therapy include interstitial radiation, wherein a source of radiation is placed in the effected tissue, and intracavity radiation, wherein the source of radiation is placed in an internal body cavity a short distance from the affected area. Radioactive material may also be delivered to tumor cells by attachment to tumor-specific antibodies. The radioactive material used in internal radiation therapy is typically contained in a small capsule, pellet, wire, tube, or implant. In contrast, radiopharmaceuticals are unsealed sources of radiation that may be given orally, intravenously or directly into a body cavity.

[0199] Radiation therapy may also include sterotactic surgery or sterotactic radiation therapy, wherein a precise amount of radiation can be delivered to a small tumor area using a linear accelerator or gamma knife and three dimensional conformal radiation therapy (3DCRT), which is a computer assisted therapy to map the location of the tumor prior to radiation treatment.

[0200] A subject in need thereof may also include, for example, a subject who has been diagnosed with a neurodegenerative disease or a subject who has been treated for a neurodegenerative disease, including subjects that have been refractory to the previous treatment.

[0201] The methods of the present invention may be used to treat any neurodegenerative disease. In certain embodiments, the neurodegenerative disease is a proteinopathy, or protein-folding disease. Examples of such proteinopathies include, but are not limited to, Alzheimer's disease, Parkinson's disease, Lewy Body Dementia, ALS, Huntington's disease, spinocerebellar ataxias and spinobulbar musclular atrophy. In other embodiments, the methods of the present invention can be used to treat any neurodegenerative disease. Neurodegenerative diseases treatable by the methods of the present invention include, but are not limited to, Adrenal Leukodystrophy, alcoholism, Alexander's disease, Alper's disease, Alzheimer's disease, Amyotrophic lateral sclerosis, ataxia telangiectasia, Batten disease, bovine spongiform encephalopathy, Canavan disease, cerebral palsy, cockayne syndrome, corticobasal degeneration, Creutzfeldt-Jakob disease, familial fatal insomnia, frontotemporal lobar degeneration, Huntington's disease, HIV-associated dementia, Kennedy's disease, Krabbe's disease, Lewy body dementia, neuroborreliosis, Machado-Joseph disease, multiple system atrophy, multiple sclerosis, narcolepsy, Niemann Pick disease, Parkinson's disease, Pelizaeus-Merzbacher disease, Pick's disease, primary lateral sclerosis, prion diseases, progressive supranuclear palsy, Refsum's disease, Sandhoff disease, Schilder's disease, subacute combined degeneration of spinal cord secondary to pernicious anaemia, Spielmeyer-Vogt-Sjogren-Batten disease, spinocerebellar ataxia, spinal muscular atrophy, Steele-Richardson-Olszewski disease, Tabes dorsalis and toxic encephalopathy.

[0202] A subject in need thereof may also include, for example, a subject who has been diagnosed with a liver disease or a subject who has been treated for a liver disease, including subjects that have been refractory to previous treatment. In certain embodiments, the liver disease is a proteinopathy, or protein-folding disease. An example of such a proteinopathy is α1-antitrypsin deficiency.

[0203] A subject in need thereof may also include, for example, a subject who has been diagnosed with a muscle disease or a subject who has been treated for a muscle disease, including subjects that have been refractory to previous treatment. In certain embodiments, the muscle disease is a proteinopathy, or protein-folding disease. Examples of such a proteinopathies include, but are not limited to, deficiency sporadic inclusion body myositis, limb girdle muscular dystrophy type 2B and Miyoshi myopathy.

[0204] A subject in need thereof may also include, for example, a subject who has been diagnosed with a proteinopathy, including subjects that have been refractory to previous treatment. Examples of proteinopathies include, but are not limited to Alzheimer's disease, cerebral β-amyloid angiopathy, retinal ganglion cell degeneration, prion diseases (e.g. bovine spongiform encephalopathy, kuru, Creutzfeldt-Jakob disease, variant Creutzfeldt-Jakob disease, Gerstmann-Straussler-Scheinker syndrome, fatal familial insomnia) tauopathies (e.g. frontotemporal dementia, Alzheimer's disease, progressive supranuclear palsy, corticobasal degeration, frontotemporal lobar degeneration), frontemporal lobar degeneration, amyotrophic lateral sclerosis, Huntington's disease, familial British dementia, Familial Danish dementia, hereditary cerebral hemorrhage with amyloidosis (Iclandic), CADASIL, Alexander disease, Seipinopathies, familial amyloidotic neuropothy, senile systemic amyloidosis, serpinopathies, AL amyloidosis, AA amyloidosis, type II diabetes, aortic medial amyloidosis, ApoAI amyloidosis, ApoII amyloidosis, ApoAIV amyloidosis, familial amyloidosis of the Finish type, lysozyme amyloidosis, fibrinogen amyloidosis, dialysis amyloidosis, inclusion body myositis/myopathy, cataracts, medullary thyroid carcinoma, cardiac atrial amyloidosis, pituitary prolactinoma, hereditary lattice corneal dystrophy, cutaneous lichen amyloidosis, corneal lactoferrin amyloidosis, corneal lactoferrin amyloidosis, pulmonary alveolar proteinosis, odontogenic tumor amylois, seminal vesical amyloid, cystric fibrosis, sickle cell disease and critical illness myopathy.

[0205] In some embodiments, the subject pharmaceutical compositions of the present invention will incorporate the substance or substances to be delivered in an amount sufficient to deliver to a patient a therapeutically effective amount of an incorporated therapeutic agent or other material as part of a prophylactic or therapeutic treatment. The desired concentration of the active agent will depend on absorption, inactivation, and excretion rates of the drug as well as the delivery rate of the compound. It is to be noted that dosage values may also vary with the severity of the condition to be alleviated. It is to be further understood that for any particular subject, specific dosage regimens should be adjusted over time according to the individual need and the professional judgment of the person administering or supervising the administration of the compositions. Typically, dosing will be determined using techniques known to one skilled in the art.

[0206] The dosage of the subject agent may be determined by reference to the plasma concentrations of the agent. For example, the maximum plasma concentration (Cmax) and the area under the plasma concentration-time curve from time 0 to infinity (AUC (0-4)) may be used. Dosages for the present invention include those that produce the above values for Cmax and AUC (0-4) and other dosages resulting in larger or smaller values for those parameters. Actual dosage levels of the active ingredients in the pharmaceutical compositions of this invention may be varied so as to obtain an amount of the active ingredient which is effective to achieve the desired therapeutic response for a particular patient, composition, and mode of administration, without being toxic to the patient.

[0207] The selected dosage level will depend upon a variety of factors including the activity of the particular agent employed, the route of administration, the time of administration, the rate of excretion or metabolism of the particular compound being employed, the duration of the treatment, other drugs, compounds and/or materials used in combination with the particular compound employed, the age, sex, weight, condition, general health and prior medical history of the patient being treated, and like factors well known in the medical arts.

[0208] A physician or veterinarian having ordinary skill in the art can readily determine and prescribe the effective amount of the pharmaceutical composition required. For example, the physician or veterinarian could prescribe and/or administer doses of the agents of the invention employed in the pharmaceutical composition at levels lower than that required in order to achieve the desired therapeutic effect and gradually increase the dosage until the desired effect is achieved.

[0209] In general, a suitable daily dose of an agent of the invention will be that amount of the agent which is the lowest dose effective to produce a therapeutic effect. Such an effective dose will generally depend upon the factors described above.

[0210] If desired, the effective daily dose of the agent may be administered as two, three, four, five, six or more sub-doses administered separately at appropriate intervals throughout the day, optionally, in unit dosage forms.

[0211] The precise time of administration and amount of any particular agent that will yield the most effective treatment in a given patient will depend upon the activity, pharmacokinetics, and bioavailability of a particular agent, physiological condition of the patient (including age, sex, disease type and stage, general physical condition, responsiveness to a given dosage and type of medication), route of administration, and the like. The guidelines presented herein may be used to optimize the treatment, e.g., determining the optimum time and/or amount of administration, which will require no more than routine experimentation consisting of monitoring the subject and adjusting the dosage and/or timing.

[0212] While the subject is being treated, the health of the subject may be monitored by measuring one or more of the relevant indices at predetermined times during a 24-hour period. All aspects of the treatment, including supplements, amounts, times of administration and formulation, may be optimized according to the results of such monitoring. The patient may be periodically reevaluated to determine the extent of improvement by measuring the same parameters, the first such reevaluation typically occurring at the end of four weeks from the onset of therapy, and subsequent reevaluations occurring every four to eight weeks during therapy and then every three months thereafter. Therapy may continue for several months or even years, with a minimum of one month being a typical length of therapy for humans. Adjustments, for example, to the amount(s) of agent administered and to the time of administration may be made based on these reevaluations.

[0213] Treatment may be initiated with smaller dosages which are less than the optimum dose of the compound. Thereafter, the dosage may be increased by small increments until the optimum therapeutic effect is attained. In addition, the combined use an agent that modulates a autotrophy-associated gene product and a second agent, e.g. another agent useful for the treatment of the autophagy-related disease, may reduce the required dosage for any individual agent because the onset and duration of effect of the different compounds and/or agents may be complimentary.

### EXAMPLES

### Materials and Methods

### Cell Lines and Culture Conditions

[0214] H4 human neuroblastoma cells were cultured under standard tissue culture conditions in DMEM media supplemented with 10% normal calf serum, penicillin/streptomycin, sodium pyruvate (Invitrogen) and, where appropriate, 0.4-1.2 mg/mL G418. LC3-GFP and FYVE-dsRed H4 cells were generated as described in Zhang et al., PNAS, 102, 15545-15550 (2007). To create a stable line expressing Lamp1, H4 cells were transfected with Lamp1-RFP plasmid using TRANSIT_LT1® transfection reagent (Mirus), followed by selection with 0.4 mg/mL G418. Bcl-2 expressing cell lines were created by infecting LC3-GFP and FYVE-dsRed H4 cells with pBabe-Bcl-2 retrovirus, followed by selection with 1 μg/mL puromycin.

[0215] For the cytokine assays, cells were seeded at 0.5×10⁵ in full medium in either 24-well (western) or 96-well (LC3-GFP quantification) plates. After 24 hours, cells were washed in PBS and serum-free OPTIMEM™ medium (Invitrogen) was added along with the indicated growth factors and/or cytokines for an additional 24 hours. Growth factors and cytokines used include human TNFα (Cell Sciences), human LIF (GeneScript Corporation), human FGF2 (ProSpec), human IGF1 (ProSpec), human SDF1 (Prospec) and human CLCF1 (R&D Systems). To induce starvation, cells were cultured for 24 hours in full media, washed in PBS and cultured for additional 4 hours in HBSS media (Invitrogen). Where indicated, 2.5 mM N-acetyl-L-cysteine (NAC, Sigma) was added at the time of media change.

[0216] For antioxidant assays, cells were treated 24 hours after siRNA transfection with N-acetyl-L-cysteine (NAC, Sigma) at a concentration of 2.5 mM and cultured for additional 48 hours before fixation and image analysis (see below for details). For western blot analysis, lysosomal protease inhibitor E64d (Sigma) was added at a concentration of 10 μg/mL for the last 8-12 hours before cell lysis.

siRNA Transfection

[0217] For the primary screens, an arrayed library of 21,121 siRNA pools covering the majority of the human genome were used (Dharmacon siARRAY™ siRNA library (Human Genome, G-005000-05), Thermo Fisher Scientific, Lafayette, Colo.). Each pool contained of 4 unique oligonucleotides targeting different sequences from the same gene. Each assay plate also included the following controls: non-targeting siRNA, mTOR siRNA, ATG5 siRNA and PLK1 siRNA (a transfection efficiency control). siRNAs were transiently transfected in triplicate into H4 cells stably expressing a LC3-GFP reporter at a final concentration of 40 nM using reverse transfection with the HIPERFECT® reagent (Qiagen). HIPERFECT® reagent was diluted 1:20 in DMEM and 8 μl of the mixture was added to wells of 384 well plates. The plates were centrifuged at 1,000 rpm, after which 2 μl of 1 μM arrayed siRNA pools were added to each well. After 30 minutes of incubation, 500 cells in 40 μl of media were added to the wells. Cells were incubated for 72 hours under standard culture conditions, counterstained with 0.5 μM Hoechst 33342 (Invitrogen) for 1 hour and fixed by addition of 30 μl of 8% paraformaldehyde. After 30 minutes, cells were washed 3 times with PBS prior to analysis.

[0218] For secondary screens, a siRNA library was used in which the 4 siRNAs of each siRNA pool were separated into individual wells. The cells were transfected and treated as in the primary screen, except that siRNAs were used at a final concentration of 30 nM (1.5 μL/well of 1 uM stock) and HIPERFECT® reagent was diluted 1:30 in OPTIMEM™ (Invitrogen). The secondary screen transfections were done in 2 rounds: in the first one a 1:1 mixture of H4 cells stably expressing LC3-GFP with FYVE-dsRed was transfected in triplicate; in the second round a 1:1 mixture of H4 cells expressing LC3-GFP with Lamp1-RFP was transfected in duplicate. All tertiary characterization screens were done in duplicate using a mixture of LC3-GFP and FYVE-dsRed cells. Each assay plate included 10-12 wells of non-targeting siRNA as well as mTOR, ATG5, PLK1 and, depending on screen, Vps34 or SOD1 siRNA controls.

[0219] For low-throughput confirmation of screen hits, cells were transfected in 12- or E-well plates using reverse transfection with 2 μl or 6 μl of HIPERFECT® reagent per mL of media, 40 nM or 10 nM final siRNA concentration and cells at 5×10⁴ or 2×10⁵ cells/mL for H4 and MCF7 cells, respectively. For RT-PCR and FACS analysis, cells were harvested after 72 hours. For western and imaging analysis, cells were split 24 hours after transfection into 24-well plates at 2.5×10⁴ or 1×10⁵ cells/ml and harvested after additional 48 hours.

### Imaging and Image Quantification

[0220] For high-throughput screens, cells were imaged on an automated CellWoRx microscope (Applied Precision) at 10× magnification using 2 wavelengths (350 nm to detect Hoechst, 488 nm to detect LC3-GFP) for the primary screens and 3 wavelengths (350 nm, 488 nm and 550 nm to detect Lamp1-RFP or FYVE-dsRed) for the secondary screens. All images were quantified using VHSscan and VHSview image analysis software (Cellomics). Total cell number, total LC3-GFP intensity/cell as well as number, area and intensity of LC3-GFP positive autophagosomes/cell were scored. All dead and mitotic cells were excluded from analysis based on nuclear intensity. The final autophagy score for each well was obtained by multiplying the total autophagosome intensity/cell by the number of autophagosomes/cell and dividing by the average cell intensity. This formula was empirically determined to accurately measure LC3-GFP translocation from cytosol into autophagosomes as reflected by consistently significant z-scores and p-values when using siRNAs against mTOR and Atg5 controls. FYVE-dsRed and Lamp1-RFP scores were obtained in a manner similar to LC3-GFP scores, except that for Lamp1-RFP, which measures total accumulation of the reporter rather than its translocation, division by the average cell intensity was omitted.

[0221] For low-throughput follow-up analysis, cells were grown on glass cover slips. Following fixation in 4% paraformaldehyde and counterstaining with Hoechst, cover slips were mounted in 50% glycerol, 0.1% n-propyl gallate/PBS. Cells were imaged at 40× magnification on a Nikon Eclipse E800 microscope. Cell numbers, cell area and intensity, as well as autophagosome number and intensity, were quantified using Metamorph software. Autophagy was scored as number of autophagosomes per cell.

### In-Cell-Western Assays

[0222] For quantitative analysis of mTORC1 signaling and induction of endoplasmic reticulum stress, in-cell-western analysis of rpS6 phosphorylation and KDEL (GRP78/GRP94) expression (‘KDEL’ disclosed as SEQ ID NO: 2), respectively, were performed. H4 cells were cultured in 384-well plates and fixed and counterstained as described for the LC3-GFP assay. Following imaging, the cells were permeabilized in PBS containing 0.2% Tx-100 and stained with ALEXA FLOUR®_{—}680NHS-ester, a non-specific lysine reactive probe used to measure relative cell number, at 20 ng/mL for 15 minutes. Subsequently, the cells were washed with PBS containing 0.2% Tx-100 and incubated for 30 minutes in blocking buffer (LICOR® Blocking Buffer diluted 1:1 with PBS+0.2% Tx-100). Cells were then incubated overnight with a rabbit-anti-rpS6 phospho-235/236 (Cell Signaling Technologies), or mouse-anti-KDEL (Stressgen) antibody (‘KDEL’ disclosed as SEQ ID NO: 2) diluted 1:1000 in blocking buffer. Following primary antibody staining, the cells were washed in PBS+0.2% Tx-100 and stained with an IRDye-800-conjugated secondary antibody (LICOR®) diluted 1:1000 in blocking buffer. The plates were scanned on the Aerius infrared imaging system (LICOR®). The intensities of both, the rpS6 phospho-235/236 or KDEL staining (‘KDEL’ disclosed as SEQ ID NO: 2), and of NHS-ester staining were integrated, and the normalized phospho-S6 or KDEL score (‘KDEL’ disclosed as SEQ ID NO: 2) were calculated by dividing phospho-rpS6 or KDEL intensity (‘KDEL’ disclosed as SEQ ID NO: 2) by NHS-ester intensity.

### Statistical Analysis

[0223] All screen data was normalized by conversion to logarithmic scale (log 10). For primary screens, z-scores were calculated based on plate median (controls excluded) and Median Absolute Deviation (MAD), with z-score=(cell score−median plate score)/(plate MAD X1.4826). The screen hits were than selected based on the median z-score of the 3 replica-plates with cutoffs set at z-score>1.7 or <−1.9, which gives a p value of 0.02. The same method was used for the rpS6 and KDEL secondary screens (‘KDEL’ disclosed as SEQ ID NO: 2) except the assays were performed in duplicate. For LC3-GFP, FYVE-dsRed and Lamp1-RFP secondary screens z-scores were calculated based on non-targeting siRNA control mean and standard deviation. For secondary confirmation of hits in the LC3-GFP assay it was required that at least 2 out of 4 individual siRNA oligonucleotides for each gene had median z-scores>1.5 or <−1.5 based on 5 replica plates and were consistent with the primary screen z-score. This resulted in p<0.01. In all other secondary assays z-scores>1.5 and <−1.5 were also considered significant. The final z-scores for confirmed genes were calculated based on average z-scores of all wells for oligonucleotides considered positive in the secondary LC3-GFP assay.

[0224] The correlation analysis between LC3-GFP and other secondary assays was performed based on individual assay well quadrant analysis: for each well a score of +1 was assigned if z-scores for both features were >1.5 or both were <−1.5; a score of −1 if one z-score was >1.5 while the other was <−1.5; a score of 0 if either z-score failed to reach the cut-off. The individual well scores were than summed up for each gene for all oligonucleotides considered significant in the LC3-GFP secondary assay and divided by the total number of wells assayed for these oligonucleotides. A correlation between features was considered to be positive if the final score was ≧0.5, negative if it was ≦−0.5.

[0225] Relative viability was calculated by dividing number of cells in each well based on Hoechst imaging by the average cell number in the plate. The reported viability for each hit gene reflects average viability of all wells for oligonucleotides positive in the secondary LC3-GFP assay. The number of positive oligonucleotides with average viability below 50% is also reported. The relative viability for +NAC and Bcl-2 tertiary assays was calculated by dividing number of cells in each well by the average cell numbers in matching control plates without NAC or Bcl-2, respectively.

[0226] Unless otherwise indicated, all remaining p values were calculated from a 2-tailed student t-test with equal variance. All error bars are standard error.

### Western Analysis

[0227] For western blots, cells were lysed in Lammeli sample buffer, resolved on a 10-12% SDS-PAGE gel and transferred to PVDF membrane. The following antibodies were used: LC3 (Novus), p62 (Pharmigen), phospho-S6K (Thr389), phospho-Akt (Ser473), phospho-Stat3 (Tyr705), RelA, Sod1, phospho-PTEN (Ser380/Thr382/383) (all Cell Signaling), Bcl-2 (Santa Cruz), all at 1:1000, phospho-S6 (Ser235/236) (Cell Signaling) and phospho-ERK 1/2 (Sigma) at 1:2000, tubulin (Sigma) at 1:5000. Where indicated, blots were quantified using NIH ImageJ64 software.

### Semi-Quantitative RT-PCR

[0228] Total RNA was prepared using RNEASY® miniprep kits (Qiagen) according to the manufacturer's instructions. For cDNA synthesis, 1.25 μg of RNA was used in the SUPERSCRIPT® First-Strand Synthesis System for RT-PCR (Invitrogen) with oligo dT primers. The following primers were used in the RT-PCR reactions: RelA AGCGCATCCAGACCAACAACAACC (SEQ ID NO: 3) and CCGCCGCAGCTGCATGGAGACC (SEQ ID NO: 4), AMPKα2 CACCTCGCCTGGGCAGTCACACC (SEQ ID NO: 5) and ATTGGGGGCATAAACACAGCATAA (SEQ ID NO: 6), Sod1 GGTGCTGGTTTGCGTCGTAGTCTC (SEQ ID NO: 7) and ACCAGTGTGCGGCCAATGATG (SEQ ID NO: 8), β actin GACCTGACAGACTACCTCAT (SEQ ID NO: 9) and AGACAGCACTGTGTTGGCTA (SEQ ID NO: 10). PCR product was resolved on 2% agarose gels and quantified using NIH ImageJ64 software.

### Quantification of Cellular Reactive Oxygen Species (ROS) Levels

[0229] ROS levels were quantified 72 hours after siRNA transfection using IMAGE-IT® LIVE Green ROS Detection Kit for microscopy (Molecular Probes) according to the manufacturer's instructions. Images were acquired on a Nikon Eclipse E800 microscope at 40× magnification and quantified using Metamorph software. Alternatively, ROS levels were quantified following 4 hour starvation in HBSS. Cells were stained with 10 μM dihydroethidium for 20 min at 37° C., washed twice in PBS and analyzed by flow cytometry.

### Bioinformatics Analysis

[0230] For enrichment analyses, siRNA screen hit genes were classified into functional categories such as biological process, molecular function (PANTHER classification system), cellular component (Gene Ontology (GO) classification system), canonical pathways (MSigDB) and transcription factor binding sites (MSigDB and TRANSFAC v7.4). To assess the statistical enrichment or over-representation of these categories for the hit genes relative to their representation in the global set of genes examined in the siRNA screen, P-values were computed using the hypergeometric probability distribution, which was implemented in the R language.

[0231] For the protein interaction network, the network was constructed by iteratively connecting interacting proteins, with data extracted from genome-wide interactome screens, from databases: HPRD, MINT, REACTOME and curated literature entries. For yeast interaction data, yeast proteins were mapped to human orthologs (reciprocal Blastp analysis and Homologene). The network uses graph theoretic representations, which abstract components (gene products) as nodes and relationships (interactions) between components as edges, implemented in the Perl programming language.

### Analysis of Hit Gene Expression During Aging

[0232] Gene expression during aging analysis was based on Affymetrix HG-U1331_Plus_{—}2 microarray data of young (≦40 years old) and old (≧70 years old) human brain samples. Array normalization, expression value calculation and clustering analysis were performed using the dChip software. Hierarchical clustering analysis was used to group genes or samples with similar expression pattern. Two genes or samples with the closest distance were first merged into a super-gene or super-sample and connected by branches with length representing their distance, and were deleted from future merging. Then the next pair of genes or samples (super-genes or super-samples) with the smallest distance was than chosen to be merged. The process was repeated until all the genes and samples were merged into one cluster.

### Example 1

### A High-Throughput Image-Based siRNA Screen for Genes Involved in the Regulation of Autophagy

[0233] Human neuroblastoma H4 cells stably expressing the LC3-GFP reporter were used to identify genes involved in the regulation of autophagy in mammals. Under normal growth conditions, LC3-GFP in these cells exhibits a diffused cytosolic localization. When autophagy is induced in these cells, LC3-GFP is recruited from the cytosol and can be visualized in a punctate pattern corresponding to autophagosomes. In order to validate the system, cells were transfected with siRNA against either the essential autophagy mediator ATG5 or against mTOR, a suppressor of starvation-induced autophagy. Following 72 hours of incubation under normal nutritional conditions, cells were transfected with ATG5 siRNA. This led to significant down-regulation of autophagy as assessed by a reduction in the number and intensity of LC3-GFP positive autophagosomes (FIG. 1A), as well as a decrease in LC3II to LC3I ratio on a western blot (FIG. 1B). Conversely, expression of siRNA against mTOR, the catalytic subunit of mTORC1, led to an increase in the number and intensity of LC3-GFP positive autophagosomes (FIG. 1A) and an increase in LC3II to LC3I ratio (FIG. 1B). Quantification of the LC3-GFP images in 384-well format acquired on a high-throughput automated fluorescent microscope revealed that the changes in the levels of autophagy following ATG5 or mTOR siRNA transfection were statistically significant as compared to non-targeting, control siRNA (FIG. 2).

[0234] This system was used to screen a human genome siRNA library containing siRNA pools targeting 21,121 genes, with each pool containing 4 independent siRNA oligonucleotides for each gene. The primary screen was performed in triplicate and resulted in the identification of 574 genes (2.7% of the all genes tested) which knock-down led to a median decrease in LC3-GFP positive autophagosome formation by at least 1.9 standard deviations (SD) or increase by at least 1.7 SD from the plate median.

[0235] The candidate genes identified in the primary screen were confirmed using a deconvolved library, in which the 4 siRNAs from each pool were evaluated separately. Of the 547 candidate genes, 236 (41%) were confirmed with at least 2 independent siRNA oligonucleotides resulting in median increase or decrease in the levels of autophagy by at least 1.5 SD as compared to non-targeting siRNA control (FIG. 3, p<0.05). Knock-down of a majority of these hits (219, 93% of all confirmed genes, Table 1) led to the induction of autophagy, indicating that these genes were autophagy-inhibiting genes, while knockdown of the remaining 17 hits led to the inhibition of autophagy, indicating that these genes were autophagy-enhancing genes (Table 2).

### Example 2

### A Secondary High-Throughput Characterization of the Candidate Genes

[0236] In order to elucidate the molecular pathways involved in regulation of autophagy by the newly identified genes, additional high-throughput assays were developed and performed to characterize the hits (FIG. 4). In one of these assays, the function of mTORC1, an essential mediator of starvation-induced autophagy was investigated. To determine which of the candidate genes regulate autophagy by altering mTORC1 activity, an in-cell-western assay was used to evaluate the phosphorylation status of a downstream target of mTORC1 signaling, the ribosomal S6 protein (rpS6). To validate this system, H4 cells were transfected with mTOR siRNA. A significant decrease in the levels of rpS6 phosphorylation in mTOR siRNA transfected cells as compared to non-targeting siRNA was observed (FIG. 5). Using the in-cell-western assay it was determined that only 14 (6%) out of the 219 confirmed genes which knockdown led to the induction of autophagy were strongly correlated with down-regulation of mTORC1 activity, while nine genes (4%) were identified in which knockdown led to up-regulation of both autophagy and of mTORC1 activity (FIG. 6).

[0237] In a follow up tertiary screen of the 17 confirmed genes which knock down resulted in suppression of autophagy, 35% of these genes were found to be able to down-regulate autophagy in the presence of rapamycin, a potent inhibitor of mTORC1, which indicates that such genes function downstream of mTORC1 (FIG. 7).

[0238] Accumulation of LC3-GFP may be due to, for example, increased initiation of autophagy or a block in degradation of autophagosomes. In order to evaluate the shape and size of the lysosomal compartment, H4 cells stably expressing lysosomal protein Lamp1-RFP were used. Knock-down of mTOR led to re-distribution as well as a significant increase in the levels of Lamp1-RFP (FIG. 8), suggesting that in addition to up-regulating autophagy, inhibition of mTOR also causes an expansion of the lysosomal compartment. Using this system it was determined that transfection of siRNAs against 78 genes (30%) led to a significant (+/−1.5 SD) change in the levels of Lamp1-RFP, which positively correlated with the changes in the levels of autophagy, suggesting that these genes regulate autophagy by altering the lysosomal function (FIG. 9).

[0239] The impact of the knock-down of the individual hits on the activity of the type III PI3 kinase, an important mediator of autophagy in both yeast and mammalian cells was also determined In order to identify genes that induce or suppress autophagy by altering type III PI3 kinase activity, H4 cells stably expressing FYVE-dsRed reporter, which specifically binds to the product of the type III PI3 kinase, PtdIns3P, were used. Accumulation of PtdIns3P caused by elevated type III PI3 kinase activity results in a punctate vesicular localization of this reporter. Transfection of siRNA against Vps34, the catalytic component of the kinase, significantly decreased FYVE-dsRed vesicle recruitment (FIGS. 10A and B). Consistent with the effects of rapamycin, knock-down of mTORC1 components mTOR and Raptor strongly increased FYVE-dsRed vesicular signal (FIG. 10C). Using this system, it was also demonstrated that knock-down of 110 (47%) out of the 236 confirmed genes led to a significant (+/−1.5 SD) alteration in PtdIns3P levels, which positively correlated with the change in LC3-GFP positive autophagosome formation (FIG. 11), suggesting that these genes act upstream of the type III PI3 kinase in the regulation of autophagy. Agents that increase the levels of both LC3-GFP and FYVE-dsRed vesicle recruitment are among those likely to induce autophagic degradation.

[0240] To further sub-divide the 219 genes which knock-down induced autophagy, the hits belonging to each of the subgroups identified in the secondary characterization assays were compared (FIG. 12). A substantial overlap between the hits with increased vesicular localization of FYVE-dsRed and those that accumulated Lamp1-RFP was demonstrated. Agents that inhibit the activity of this subset of genes are among those likely will simultaneously regulate the type III PI3 kinase, autophagy and lysosomal activity.

### Example 3

### Cell Death and ER Stress are not Major Contributors to the Induction of the Autophagy Induced During the siRNA Screen

[0241] It was investigated whether the induction of autophagy observed during the siRNA screen reflected a general response to cellular stress following knock-down of an essential gene, rather than a specific function of that gene in the regulation of autophagy. Expression of Bcl-2 significantly improved average cell viability following siRNA transfection (FIGS. 13-15). With the exception of Kif 11 and integrin α5, knock-down of the 91 genes able to induce autophagy in cells expressing Bcl-2 failed to generate substantial loss of viability in these cells. This suggests that up regulation of autophagy following inhibition of these genes was not dependent on the induction of a cell death response. Of the genes which knock-down was unable to up regulate autophagy in cells expressing Bcl-2, 81 had high (over 85%) viability in wild type cells. Therefore, inhibition of the activity of 170 of the 129 identified autophagy-inhibitor genes results in the induction of autophagy through a cell-death independent mechanism.

[0242] In addition to cell death, autophagy is often induced in response to various forms of cellular stress, including ER stress. In order to determine whether stimulation of autophagy in response to knock-down of our hit genes could be due to ER stress, in-cell-western assays assessing the expression levels of GRP78 and GRP94, specific markers of ER stress, were performed. Treatment with tunicamycin, a potent inducer of ER stress, led to a dose-dependent up-regulation of GRP78 and GRP94 (FIG. 16), as well as to increase in autophagy. In 97% of the genes tested (182 out of 188 genes tested, FIG. 17) there was no significant up-regulation of ER stress following knock-down of genes leading to the stimulation of autophagy. Therefore, ER stress is not a major contributor to the induction of the autophagy observed in the screen. The data therefore suggest that induction of autophagy following knock-down of the majority of the hits is due to the induction of a specific signaling event, rather than a part of a general cellular stress response induced by cell death or a result of a widespread ER stress.

### Example 4

### The Effects of Bcl-2 on Induction of Autophagy

[0243] Beclin 1, the regulatory autophagy specific component of the type III PI3 kinase, was originally identified as a binding partner of the anti-apoptotic protein Bcl-2. Recently, in addition to its prominent function in regulation of apoptotic cell death, Bcl-2 has been suggested to negatively regulate autophagy through its interaction with beclin 1 and consequent inhibition of the type III PI3 kinase activity. In order to assess the function of Bcl-2, a tertiary characterization screen was performed to compare the induction of autophagy and the type III PI3 kinase activity in wild-type H4 cells and cells stably expressing Bcl-2 (FIG. 18). As a control, it was demonstrated that knock-down of mTOR was able to significantly induce both LC3-GFP and FYVE-dsRed vesicle recruitment in the Bcl-2 expressing cells (FIGS. 19A and B). Consistent with the proposed negative regulation of type III PI3 kinase by Bcl-2, a significant decrease in average FYVE-dsRed induction following knock down of the hit genes in H4 cells expressing Bcl-2 as compared to wild type controls occurred (FIG. 19C). Knock-down of 91 (42%) out of the 215 tested genes was able to induce translocation of LC3-GFP to autophagosomes in the presence of Bcl-2 (FIGS. 14 and 20). In 17 (19%) out of these 91 genes induction of autophagy was correlated with the increase in type III PI3 kinase activity as assessed by the vesicle recruitment of FYVE-dsRed, indicating that these genes are involved in additional mechanisms that regulate production of PtdIns3P downstream of Bcl-2. On the other hand, knock-down of the remaining 74 genes was able to induce autophagy without additional activation of the type III PI3 kinase. Knock-down of 31 of these genes led to Lamp1-RFP accumulation in wild type H4 cells, indicating that, in these cases, a block in lysosomal degradation may contribute to the increase in autophagy in Bcl-2 expressing cells. No changes in the lysosomal function were observed for the remaining 43 genes. Thus the inhibitory effect of Bcl-2 on type III PI3 kinase is not always incompatible with the induction of autophagy, the activation of which can be accomplished without increase in PtdIns3P levels. Finally, knock-down of the remaining 124 (58%) genes was unable to induce accumulation of vesicular LC3-GFP in cells over expressing Bcl-2 (FIG. 15).

### Example 5

### Bioinformatics Network Analysis of Autophagy-Related Genes

[0244] In order to further elucidate the biological networks involved in regulation of autophagy, interactions between the hit genes were explored by mapping their direct physical interactions based on both mammalian and yeast data. Among the hits were included multiple members of several known protein complexes (FIG. 21A), including 2 subunits of NF-κB (NFκB 1 and RelA), 3 ribonucleoproteins involved in pre-mRNA processing (HNRPK, HNRPM and HNRPNU), 3 coatamer components (CopB2, CopE and Arcn1) and 2 AMPK subunits (AMPKa2 and AMPKγ3). Additionally, a large network of interacting transcription factors and chromatin modifying enzymes centered on p300 HAT and NFκB were identified (FIG. 21B). The latter indicates that transcriptional regulation may play a critical role in the regulation of autophagy.

[0245] Interolog analysis (yeast-human orthologous mapping of protein-protein interactions) between the core autophagy components and the genes identified in the screen revealed that at least two of the hits, Xpo1 and OGDH, may physically interact with core autophagic machinery (FIG. 22). Xpo1 is the mammalian homolog of yeast CRM1 and an essential component of nuclear export machinery. Its interaction with Beclin1 and Atg12 likely reflects its function in the nuclear export of these proteins. On the other hand, OGDH, a metabolic enzyme localized to the mitochondrial matrix, has been reported to have cytoprotective activity independent of the enzymatic activity of the associated complex, making it a candidate for the regulation of autophagy induced by mitochondrial damage.

[0246] In order to investigate the connection between autophagy, axon guidance and actin dynamics, a protein-protein interaction network anchored by the hit genes belonging to these canonical pathways was generated (FIGS. 23 and 24). This analysis revealed two related networks encompassing, respectively, 27 and 61 of the hit genes.

[0247] These analyses indicate that autophagy can be modulated through the use of agents that modulate the activity of specific pathways and complexes identified herein as being associated with the regulation of autophagy.

### Example 6

### The Use of Cytokines in the Modulation of Autophagy

[0248] Molecular function analysis of the 236 confirmed hits using Gene Ontology (GO) revealed a highly significant enrichment in genes encoding kinases (p=0.0006), proteins with receptor activity (p=7.7×10⁻⁵) and extracellular matrix proteins (p=0.03) (FIGS. 25 and 26). The latter categories indicate that the extracellular environment, including the presence of growth factors, hormones and cytokines, plays a role in the regulation of autophagy under normal nutritional conditions. The results of GO biological process analysis also demonstrated significant enrichment in signaling molecules (p=2.8×10⁻⁷) (FIG. 27A). In agreement with the proposed function of extracellular factors in regulation of autophagy, further subdivision of these signaling molecules revealed that the largest sub-group (49%) was involved in cell surface receptor signal transduction (FIG. 27B).

[0249] Cells were treated with several of the cytokines and growth factors identified as hits in our screen. Based on the results of the characterization assays, knock-down of IGF1, FGF2, LIF, CLCF1 and the chemokine SDF1 (CXCL12) resulted in mTORC1 independent increase in initiation of autophagy. In agreement, treatment of H4 LC3-GFP cells grown in a serum-free medium with any of these cytokines led to a significant down-regulation of autophagy as measured by LC3-GFP translocation (FIGS. 28 and 29). This data was confirmed in multiple cell lines (H4, HEK293, HeLa and MCF7) by western blot (FIG. 30). In agreement with the proposed function of cytokines in the regulation of autophagy, cells cultured in their absence displayed high basal levels of autophagy as assessed by accumulation of LC3II, which was partially suppressed by the addition of even single cytokines identified in the screen. Thus, the identified cytokines and growth factors are both necessary and sufficient for the regulation of autophagy.

[0250] In the screen described above, knock-down of the TNF gene led to an increase in the formation of LC3-GFP positive autophagosomes, indicating a negative role for this cytokine in the regulation of basal autophagy. In order to further investigate the role of TNFα in autophagy, H4 LC3-GFP cells grown in a defined medium were treated with increasing doses of TNFα. Low doses of TNFα led to down-regulation of autophagy, while higher doses led to up-regulation of autophagy (FIG. 31A). This was confirmed by western blot showing a significant accumulation of p62 following treatment with low levels of TNFα (FIG. 31B). Since physiological levels of TNFα are very low, this suggests that this cytokine normally functions as a negative regulator of autophagy. On the other hand, increased concentrations of TNFα under pathological conditions lead to up-regulation of autophagy.

### Example 7

### The Function of NF-κB in the Regulation of Autophagy

[0251] The canonical pathway analysis described above demonstrated enrichment of autophagy hits in the NF-κB (p=8.7×10⁻⁶) and RelA (p=1.2×10⁻⁶) pathways. As a validation of the screen, H4 LC3-GFP cells transfected with siRNAs against RelA were individually imaged. The levels of autophagy by quantifying translocation of LC3-GFP by fluorescence microscopy were assessed using an alternative low-throughput method. In agreement with our screen results treatment with all 4 oligonucleotides against RelA lead to strong down-regulation of number and intensity of autophagosomes (FIGS. 32 and 33). Confirming that the observed differences in the levels of autophagy were due to the knock-down of the target genes, a strong down-regulation of RelA at both mRNA (FIG. 34A) and protein level (FIG. 34B) was observed. In order to confirm that the findings regarding the function of NF-κB as a positive mediator of autophagy are not restricted to H4 cells, levels of autophagy in wild-type and double knock-out RelA^{-/-}; NF-κB^{-/-} (DKO) MEFs and in human breast cancer MCF7 cells transfected with either siRNA were compared against RelA or control non-targeting siRNA. Absence or down-regulation of RelA/NFκB expression led to suppression of autophagy as assessed by decrease in LC3 II and accumulation of p62 (FIG. 35). These data confirm NFκB as a positive regulator of basal autophagy.

[0252] In contrast with the results described herein, NF-κB activation has been previously reported to negatively regulate autophagy associated with cell death induced in response to noxious stimuli such as nutrient starvation or death receptor ligation (Djavaheri-Mergy et al., J. Biol. Chem. 281, 30373-30382 (2006)). Since reactive oxygen species (ROS) have been proposed to participate in the mediation of starvation-induced autophagy, it was hypothesized that, under conditions of nutrient deprivation, down regulation of autophagy may be the result of the attenuation of ROS production by NF-κB. Wild type and dKO MEFs and H4 LC3-GFP cells transfected with either non-targeting siRNA or siRNA against RelA were subjected to nutrient starvation. Starvation of RelA/NF-κB deficient cells led to higher ROS accumulation than observed in wild type controls (FIG. 36). The elevated induction of autophagy observed in response to starvation in RelA deficient H4 cells was attenuated in the presence of the antioxidant N-acetyl-L-cysteine (NAC) (FIG. 37).

[0253] These data indicate that, while NF-κB plays a positive function in regulation of basal autophagy, its ability to attenuate ROS production can indirectly lead to decrease in the levels of autophagy observed under nutrient starvation condition. Thus, contrary to previous reports, NF-κB acts as an autophagy-enhancer under the non-starvation conditions most prevalent in multicellular organisms. Therefore, agents that inhibit the activity of the components of NF-κB (NFKB1 and RELA) act as inhibitors of autophagy and are useful for the treatment of cancer and/or pancreatitis.

### Example 8

### The Function of Reactive Oxygen Species (ROS) in Regulation of Autophagy

[0254] Genes that induce autophagy when knocked-down included SOD1 and GPx2, the major components of the ROS detoxification pathway, as well as several mitochondrial proteins, many of them involved in oxidative respiration and electron transport (FIG. 38). Inhibition of the activity of any of these genes would be expected to lead to the up-regulation of the levels of ROS by either increasing their production or blocking their degradation. Furthermore, many additional screen hits have been reported to be involved in the regulation or to be regulated by ROS (FIG. 39). In order to evaluate a possible role of ROS as a general mediator of autophagy, it was first confirmed that transfection of SOD1 siRNA led to both the induction of autophagy as well as elevated levels of ROS (FIG. 40). Confirming a causal role of ROS, treatment with the antioxidant NAC significantly attenuated induction of autophagy caused by knock-down of Sod1 (FIG. 41). Therefore, interference with normal cellular ROS homeostasis is sufficient for the induction of autophagy.

[0255] In order to determine if ROS may have a general signaling role during induction of autophagy, a tertiary characterization screen to compare levels of autophagy and type III PI3 kinase activity induced by knock-down of our hit genes in the presence and absence of NAC was performed. Knocking-down a group of the confirmed genes (117, or 54% of all genes tested) led to vesicular LC3-GFP accumulation in the absence but not the presence of the antioxidant, indicating that ROS were required for the induction of autophagy (FIG. 42). Knock-down of these genes also largely failed to increase the accumulation of vesicle-associated FYVE-dsRed in the presence of NAC (FIGS. 42 and 43). This indicates that ROS serve a general function in activation of the type III PI3 kinase, implicating them as important signaling molecules in the early steps of the autophagic pathway.

[0256] On the other hand, inhibition of the activity of the remaining 98 (46%) genes was able to induce accumulation of LC3-GFP in the presence of NAC, indicating that, in these cases, autophagy can be induced independently of ROS (FIG. 44). Knock-down of these genes was also able to induce comparable average levels of vesicular FYVE-dsRed in the presence and absence of NAC (FIG. 43). Thus, inhibition of the activity of this group of genes led to induction of the type III PI3 kinase through a mechanism independent of ROS.

### Example 9

### Growth Promoting Pathways Negatively Regulate Autophagy

[0257] Bioinformatics analysis of the autophagy screen hits indicated significant enrichment for several canonical pathways known to mediate signaling from cell surface receptors (FIG. 45). These pathways included the MAPK (p=0.039), Stat3 (p=0.008) and CXCR4 (p=1.1×10⁻⁵) pathways regulated by the cytokines identified in the screen. FGF2 is known to activate the MAPK pathway and an increased level of phospho-ERK1/2 and phospho-RSK were observed following treatment with FGF2 (FIG. 46). Confirming the essential function of the MAPK pathway, pre-treatment with UO126, an inhibitor of MEK, attenuated inhibition of autophagy following addition of FGF2 (FIG. 46). Additionally, analysis of the promoter regions of all the hit genes revealed significant enrichment in consensus sites for several transcription factors (FIG. 47), including 3 enriched sites for RSRFC4, a member of the serum response factor (SRF) family and a downstream target of MAPK signalling, suggesting additional involvement of transcriptional regulation by the MAPK pathway in control of autophagy under normal growth conditions.

[0258] Another hit gene pulled out of the screen as a negative regulator of autophagy was the transcription factor Stat3, a mediator of LIF and CLCF1 signaling. Indeed, treatment with either LIF or CLCF1 increased activating phosphorylation of Stat3 (FIGS. 48 and 49). Consistent with the essential function of Stat3, its siRNA mediated knock-down attenuated down-regulation of autophagy in response to LIF (FIG. 49). Therefore, LIF and CLCF1 regulate autophagy through the Stat3 pathway.

[0259] In addition to activating mTORC1, Akt directly phosphorylates and inhibits Foxo3a, a transcription factor that positively regulates autophagy during muscle degeneration. Indeed, phosphorylation of both Akt and Foxo3a was increased following IGF-1 treatment in both the absence and presence of rapamycin (FIG. 50). Inhibition of Akt by treatment with Akt inhibitor VIII attenuated phosphorylation of both Foxo3a and the mTORC1 target S6 kinase, as well as prevented inhibition of autophagy by IGF1 (FIG. 50). Therefore, under normal nutrient conditions IGF-1 regulates autophagy in a type I PI3 kinase/Akt dependent manner, likely through both the mTORC1 and Foxo3a pathways.

### Example 10

### The Down Regulation of Autophagy During Human Aging

[0260] In order to specifically address the potential function of the autophagy-related genes in neurodegeneration associated with aging, the mRNA expression of the autophagy hit genes were analyzed in a set of young versus old human brain samples. Differential expression of a large subset of genes (FIGS. 51 and 52) was observed, including a groups of 32 genes significantly (p<0.05) up-regulated and 46 genes significantly down-regulated with age (FIG. 53-55). Interestingly, gene ontology (GO) biological process analysis revealed that the age up regulated group was highly enriched in genes involved in mediation and regulation of the MAPK pathway (p=1.6×10⁻⁴), the increased activity of which is predicted by our analysis to lead to the suppression of autophagy. Conversely, expression of the key autophagy genes, Atg5 and Atg7, was down regulated during aging (FIG. 55). These data suggest that differential gene expression leads to the down regulation of autophagy in the brain during aging, which would contribute to development of chronic neurodegenerative diseases. Consistent with this hypothesis, further analysis in a more extensive set of samples, including those from middle-aged individuals, revealed that Atg5 and Atg7 were among a group of genes necessary for the mediation of autophagy in mammalian cells whose expression was gradually down-regulated in an age-dependent manner starting in the early sixties (FIG. 56), which is often the earliest age of onset for the sporadic neurodegenerative diseases such as Alzheimer's Disease (AD). Therefore, age-dependent regulation of genes identified in our screen likely contributes to down-regulation of autophagy during normal human aging, and thus useful as therapeutic targets to prevent and treat age-related neurodegenerative diseases.

### Example 11

### Differential Expression of Autophagy Regulators in Alzheimer's Disease Brain samples

[0261] Accumulation of both ROS and autophagic vesicles (AV) are early features in AD. To determine if we can detect changes in the expression of genes involved in regulation of autophagy in this disease, the expression of the autophagy screen hit genes from six brain regions of 34 cases with AD and 14 age-matched normal controls were analyzed. An overall significant under-expression of the hit genes in AD patient samples compared to controls specifically in the hippocampus and entorhinal cortex, the brain regions most affected by the disease, were observed (FIG. 57A). Consistent trends were observed in other brain regions affected by AD (superior frontal gyrus, posterior cingulate, and medial temporal gyms). Notably, in the visual cortex, a brain region relatively resistant to AD pathology, these changes were absent. Further sub-division of the hit genes revealed that in the entorhinal cortex negative regulators of autophagy flux were specifically negatively enriched (FIG. 57B). A similar trend was also observed in other brain areas affected by AD. Conversely, positive regulators of autophagy were positively enriched in the entorhinal cortex (FIG. 57C). Such differential expression patterns of autophagy regulators suggest up-regulation of autophagy in AD brains.

### Example 12

### ROS Mediate Autophagy in Response to Amyloid β

[0262] Amyloid β (Aβ) is the main pathogenic factor in AD. Whether induction of autophagy by Aβ was be mediated by ROS was examined. Following treatment of H4 cells with Aβ, increased levels of autophagy were observed (FIG. 58). In order to determine if this was due to an increase in the initiation of autophagy or to a block in lysosomal degradation, the accumulation of LC3-II following Aβ treatment in the absence and presence of lysosomal protease inhibitor E64d was observed (FIG. 58). Up to 8 hours after treatment, the accumulation of LC3-II could be observed only in the presence of E64d. At 48 hrs after the addition of Aβ, the increased levels of LC3-II were observed even without E64d, but were further increased in the presence of E64d, Additionally, increased conjugation of Atg12-Atg5 starting 4 hours after Aβ treatment was observed. Together these data indicate increased initiation of autophagy in response to Aβ.

[0263] The involvement of type III PI3 kinase in the induction of autophagy by Aβ was investigated. Accumulation of PtdIns3P was observed, which was suppressed in the presence of 3MA (FIG. 59), confirming the involvement of the type III PI3 kinase. In agreement with a causal role of ROS, accumulation of PtdIns3P was suppressed in the presence of NAC (FIG. 60). Finally, treatment with 3MA (FIG. 61) or knock down of Vps34 (FIG. 62) was able to attenuate induction of autophagy in response to Aβ.

### EQUIVALENTS

[0264] The present invention provides, methods for the modulation of autophagy and the treatment of autophagy related diseases. While specific embodiments of the subject invention have been discussed, the above specification is illustrative and not restrictive. Many variations of the invention will become apparent to those skilled in the art upon review of this specification. The appended claims are not intended to claim all such embodiments and variations, and the full scope of the invention should be determined by reference to the claims, along with their full scope of equivalents, and the specification, along with such variations.

[0265] All publications and patents mentioned herein are hereby incorporated by reference in their entirety as if each individual publication or patent was specifically and individually indicated to be incorporated by reference. In case of conflict, the present application, including any definitions herein, will control.

What is claimed is:

1. A method of inhibiting autophagy in a cell comprising contacting said cell with an agent that inhibits the activity of a product of a gene selected from the group consisting of the genes listed in Table 2.

2. The method of claim 1, wherein the gene is selected from the group consisting of the genes listed in Table 4.

3. The method of claim 1, wherein said gene is selected from the group consisting of the genes listed in Table 6.

4. The method of claim 1, wherein said agent is a siRNA, shRNA or antisense RNA molecule.

5. The method of claim 3, wherein said gene is TPR or GPR18.

6. The method of claim 5, wherein said agent is an antibody specific for the product of said gene.

7. The method of claim 1, wherein said gene is RelA or NFκB.

8. The method of claim 7, wherein said gene is RelA.

9. A method of inducing autophagy in a cell comprising contacting said cell with an agent that enhances the activity of a product of a gene selected from the group consisting of the genes listed in Table 2 (hits that decrease autophagy).

10. The method of claim 9, wherein said gene is selected from the group consisting of the genes listed in Table 4.

11. The method of claim 9, wherein said gene is selected from the group consisting of the genes listed in Table 6.

12. The method of claim 11, wherein said gene is TPR or GPR18.

13. The method of claim 12, wherein said agent is an antibody specific for the product of said gene.

14. The method of claim 9, wherein said gene is RelA or NFκB.

15. The method of claim 14, wherein said gene is RelA.

16. A method of treating a neurodegenerative disease in a subject comprising administering to said subject an agent that enhances the activity of a product of a gene selected from the group consisting of the genes listed in Table 2.

17-50. (canceled)

The application's sequence listing, which the Patent Office published only in electronic form, follows.

SEQUENCE LISTING (246 sequences)

SEQ ID NO: 1 - protein, 4 aa, Homo sapiens
DEAD

SEQ ID NO: 2 - protein, 4 aa, Artificial Sequence
  source: /note="Description of Artificial Sequence: Synthetic peptide"
KDEL

SEQ ID NO: 3 - DNA, 24 bp, Artificial Sequence
  source: /note="Description of Artificial Sequence: Synthetic primer"
agcgcatccagaccaacaacaacc

SEQ ID NO: 4 - DNA, 22 bp, Artificial Sequence
  source: /note="Description of Artificial Sequence: Synthetic primer"
ccgccgcagctgcatggagacc

SEQ ID NO: 5 - DNA, 23 bp, Artificial Sequence
  source: /note="Description of Artificial Sequence: Synthetic primer"
cacctcgcctgggcagtcacacc

SEQ ID NO: 6 - DNA, 24 bp, Artificial Sequence
  source: /note="Description of Artificial Sequence: Synthetic primer"
attgggggcataaacacagcataa

SEQ ID NO: 7 - DNA, 24 bp, Artificial Sequence
  source: /note="Description of Artificial Sequence: Synthetic primer"
ggtgctggtttgcgtcgtagtctc

SEQ ID NO: 8 - DNA, 21 bp, Artificial Sequence
  source: /note="Description of Artificial Sequence: Synthetic primer"
accagtgtgcggccaatgatg

SEQ ID NO: 9 - DNA, 20 bp, Artificial Sequence
  source: /note="Description of Artificial Sequence: Synthetic primer"
gacctgacagactacctcat

SEQ ID NO: 10 - DNA, 20 bp, Artificial Sequence
  source: /note="Description of Artificial Sequence: Synthetic primer"
agacagcactgtgttggcta

SEQ ID NO: 11 - DNA, 1449 bp, Homo sapiens
ctggatagaacagctcaagccttgccacttcgggcttctcactgcagctgggcttggacttcggagttttgccattgccagtgggacgtctgagactttctccttcaagtacttggcagatcactctcttagcagggtctgcgcttcgcagccgggatgaagctggtttccgtcgccctgatgtacctgggttcgctcgccttcctaggcgctgacaccgctcggttggatgtcgcgtcggagtttcgaaagaagtggaataagtgggctctgagtcgtgggaagagggaactgcggatgtccagcagctaccccaccgggctcgctgacgtgaaggccgggcctgcccagacccttattcggccccaggacatgaagggtgcctctcgaagccccgaagacagcagtccggatgccgcccgcatccgagtcaagcgctaccgccagagcatgaacaacttccagggcctccggagctttggctgccgcttcgggacgtgcacggtgcagaagctggcacaccagatctaccagttcacagataaggacaaggacaacgtcgcccccaggagcaagatcagcccccagggctacggccgccggcgccggcgctccctgcccgaggccggcccgggtcggactctggtgtcttctaagccacaagcacacggggctccagcccccccgagtggaagtgctccccactttctttaggatttaggcgcccatggtacaaggaatagtcgcgcaagcatcccgctggtgcctcccgggacgaaggacttcccgagcggtgtggggaccgggctctgacagccctgcggagaccctgagtccgggaggcaccgtccggcggcgagctctggctttgcaagggcccctccttctgggggcttcgcttccttagccttgctcaggtgcaagtgccccagggggcggggtgcagaagaatccgagtgtttgccaggcttaaggagaggagaaactgagaaatgaatgctgagacccccggagcaggggtctgagccacagccgtgctcgcccacaaactgatttctcacggcgtgtcaccccaccagggcgcaagcctcactattacttgaactttccaaaacctaaagaggaaaagtgcaatgcgtgttgtacatacagaggtaactatcaatatttaagtttgttgctgtcaagattttttttgtaacttcaaatatagagatatttttgtacgttatatattgtattaagggcattttaaaagcaattatattgtcctcccctattttaagacgtgaatgtctcagcgaggtgtaaagttgttcgccgcgtggaatgtgagtgtgtttgtgtgcatgaaagagaaagactgattacctcctgtgtggaagaaggaaacaccgagtctctgtataatctatttacataaaatgggtgatatgcgaacagcaaacc

SEQ ID NO: 12 - DNA, 423 bp, Homo sapiens
ctgcagctgcctgaaggagccatctcatccacagctcttccttgagcagccatggccagctccaggcgaggcctcctgctcctgctgctgctgactgcccaccttggaccctcagaggctcagcactggtcccatggctggtaccctggaggaaagcgagccctcagctcagcccaggatccccagaatgcccttaggcccccaggaagggccctggacactgcagcaggcagcccagtccagactgcccatggcctcccaagtgatgccctggctcccctggacgacagcatgccctgggagggcaggaccacggcccagtggtcccttcacaggaagcgacacctggcacggacactgctgaccgcagcccgagagccccgccccgccccgccatcctccaataaagtgtgaggttctccg

SEQ ID NO: 13 - DNA, 1743 bp, Homo sapiens
aaagaaggtaagggcagtgagaatgatgcatcttgcattccttgtgctgttgtgtctgccagtctgctctgcctatcctctgagtggggcagcaaaagaggaggactccaacaaggatcttgcccagcaatacctagaaaagtactacaacctcgaaaaggatgtgaaacagtttagaagaaaggacagtaatctcattgttaaaaaaatccaaggaatgcagaagttccttgggttggaggtgacagggaagctagacactgacactctggaggtgatgcgcaagcccaggtgtggagttcctgacgttggtcacttcagctcctttcctggcatgccgaagtggaggaaaacccaccttacatacaggattgtgaattatacaccagatttgccaagagatgctgttgattctgccattgagaaagctctgaaagtctgggaagaggtgactccactcacattctccaggctgtatgaaggagaggctgatataatgatctctttcgcagttaaagaacatggagacttttactcttttgatggcccaggacacagtttggctcatgcctacccacctggacctgggctttatggagatattcactttgatgatgatgaaaaatggacagaagatgcatcaggcaccaatttattcctcgttgctgctcatgaacttggccactccctggggctctttcactcagccaacactgaagctttgatgtacccactctacaactcattcacagagctcgcccagttccgcctttcgcaagatgatgtgaatggcattcagtctctctacggacctccccctgcctctactgaggaacccctggtgcccacaaaatctgttccttcgggatctgagatgccagccaagtgtgatcctgctttgtccttcgatgccatcagcactctgaggggagaatatctgttctttaaagacagatatttttggcgaagatcccactggaaccctgaacctgaatttcatttgatttctgcattttggccctctcttccatcatatttggatgctgcatatgaagttaacagcagggacaccgtttttatttttaaaggaaatgagttctgggccatcagaggaaatgaggtacaagcaggttatccaagaggcatccataccctgggttttcctccaaccataaggaaaattgatgcagctgtttctgacaaggaaaagaagaaaacatacttctttgcagcggacaaatactggagatttgatgaaaatagccagtccatggagcaaggcttccctagactaatagctgatgactttccaggagttgagcctaaggttgatgctgtattacaggcatttggatttttctacttcttcagtggatcatcacagtttgagtttgaccccaatgccaggatggtgacacacatattaaagagtaacagctggttacattgctaggcgagatagggggaagacagatatgggtgtttttaataaatctaataattattcatctaatgtattatgagccaaaatggttaatttttcctgcatgttctgtgactgaagaagatgagccttgcagatatctgcatgtgtcatgaagaatgtttctggaattcttcacttgcttttgaattgcactgaacagaattaagaaatactcatgtgcaataggtgagagaatgtattttcatagatgtgttattacttcctcaataaaaagttttattttgggcctgttcctt

SEQ ID NO: 14 - DNA, 1741 bp, Homo sapiens
tgggatggaggggccagtgctgacactggggctgctggctgccctggcggtgtgtggcagctgggggctgaacgaggaggagcggctgatccggcacctgtttcaagagaagggctacaacaaggagctccggcccgtggcacacaaagaggagagtgtggacgttgccctggccctcacactctccaacctcatctccctgaaagaagttgaggagaccctcactaccaatgtgtggatagagcacggctggacagacaaccggctgaagtggaatgctgaagaatttggaaacatcagtgtcctgcgcctccccccggacatggtgtggctcccagagattgtgctggagaacaacaatgacggctccttccagatctcctactcctgcaacgtgcttgtctaccactacggcttcgtgtactggctgccacctgccatcttccgctcctcctgccccatctctgtcacctatttccccttcgactggcagaactgctccctcaagttcagttccctcaagtatacggccaaagagatcaccctgagcctgaaacaggatgccaaggagaaccgcacctaccccgtggagtggatcatcattgatcctgaaggcttcacagagaacggggagtgggagatagtccaccggccggccagggtcaacgtggaccccagagcccctctggacagccccagccgccaggacatcaccttctacctcatcatccgccgcaagcccctcttctacatcatcaacatcctggtgccctgcgtgctcatctccttcatggtcaacctggtcttctacctaccggctgacagtggtgagaagacatcagtggccatctcggtgctcctggctcagtctgtcttcctgctgctcatctccaagcgtctgcctgccacatccatggccatcccccttatcggcaagttcctgctcttcggcatggtgctggtcaccatggttgtggtgatctgtgtcatcgtgctcaacatccacttccgaacacccagcacccatgtgctgtctgagggggtcaagaagctcttcctggagaccctgccggagctcctgcacatgtcccgcccagcagaggatggacccagccctggggccctggtgcggaggagcagctccctgggatacatctccaaggccgaggagtacttcctgctcaagtcccgcagtgacctcatgttcgagaagcagtcagagcggcatgggctggccaggcgcctcaccactgcacgccggcccccagcaagctctgagcaggcccagcaggaactcttcaatgagctgaagccagctgtggatggggcaaacttcattgttaaccacatgagggaccagaacaattacaatgaggagaaagacagctggaaccgagtggcccgcacagtggaccgcctctgcctgtttgtggtgacgcctgtcatggtggtgggcacagcctggatcttcctgcagggcgtttacaaccagccaccaccccagccttttcctggggacccctactcctacaacgtgcaggacaagcgcttcatctagggtgggcctgttggggagccaggagacagcagggtctgagagaggagccacagtccctaatgacacccactcctagccctgaggctcgtgcccctcagactggggaagagtccaaggaagggagggagcagccactcctcaatgctcaatggctcccctgaaatcaagacaggggccacccga

SEQ ID NO: 15 - DNA, 489 bp, Homo sapiens
agagccgcaggtcagtcgtgaagagggagctctattgccaccatgagtttctccggcaagtaccaactgcagagccaggaaaactttgaagccttcatgaaggcaatcggtctgccggaagagctcatccagaaggggaaggatatcaagggggtgtcggaaatcgtgcagaatgggaagcacttcaagttcaccatcaccgctgggtccaaagtgatccaaaacgaattcacggtgggggaggaatgtgagctggagacaatgacaggggagaaagtcaagacagtggttcagttggaaggtgacaataaactggtgacaactttcaaaaacatcaagtctgtgaccgaactcaacggcgacataatcaccaataccatgacattgggtgacattgtcttcaagagaatcagcaagagaatttaaacaagtctgcatttcatattattttagtgtgtaaaattaatgtaataaagtgaactttgtttt

SEQ ID NO: 16 - DNA, 888 bp, Homo sapiens
gcatggcggccaccaggtgcctgcgctggggcctgagccgagccggagtctggctgctcccaccgcccgcacggtgcccacgccgggcgctgcacaagcagaaagacggcactgagttcaagagcatctacagcctggacaagctctaccccgaatctcagggctcggacaccgcctggagggtcccgaatggtgcaaagcaagccgacagtgacatccctctagatcgcttgacaatatcttattgtcggagtagtggtcctggggggcagaatgtgaacaaagtgaattccaaggcagaagtcaggttccatttggcaactgccgagtggatcgcggagcccgtgcggcagaagatagccatcacgcataaaaacaagatcaacaggttaggagagttgatccttacctctgagagcagccgctatcagttccggaatctggcagattgcctgcagaaaattcgagacatgatcactgaggccagccagacaccgaaggagccaacaaaagaagatgttaaacttcatagaatcaggatagaaaacatgaatcgggaaaggctgagacaaaagagaattcattctgctgtaaagacaagcaggagggtcgacatggactgaaatcaccctctgcagctgggagggctcttctgggcgtccgggcagctgcagctgagaggactttcacaccataaggagatttctgtttttctttttggctgttaatgcttgtctataacattggagccatcacaagaatgttcatttggaatgaaggctgcaggcactggttgcagacgtctttataggcagtcaccatgttgtcaaaccttaataatgcacctcatgtattagtcacaataaaaatcagaactcaaaaaaaaaa

SEQ ID NO: 17 - DNA, 870 bp, Homo sapiens
atgtggaacgcgacgcccagcgaagagccggggttcaacctcacactggccgacctggactgggatgcttcccccggcaacgactcgctgggcgacgagctgctgcagctcttccccgcgccgctgctggcgggcgtcacagccacctgcgtggcactcttcgtggtgggtatcgctggcaacctgctcaccatgctggtggtgtcgcgcttccgcgagctgcgcaccaccaccaacctctacctgtccagcatggccttctccgatctgctcatcttcctctgcatgcccctggacctcgttcgcctctggcagtaccggccctggaacttcggcgacctcctctgcaaactcttccaattcgtcagtgagagctgcacctacgccacggtgctcaccatcacagcgctgagcgtcgagcgctacttcgccatctgcttcccactccgggccaaggtggtggtcaccaaggggcgggtgaagctggtcatcttcgtcatctgggccgtggccttctgcagcgccgggcccatcttcgtgctagtcggggtggagcacgagaacggcaccgacccttgggacaccaacgagtgccgccccaccgagtttgcggtgcgctctggactgctcacggtcatggtgtgggtgtccagcatcttcttcttccttcctgtcttctgtctcacggtcctctacagtctcatcggcaggaagctgtggcggaggaggcgcggcgatgctgtcgtgggtgcctcgctcagggaccagaaccacaagcaaaccgtgaaaatgctgggtgggtctcagcgcgcgctcaggctttctctcgcgggtcctatcctctccctgtgccttctcccttctctctga

SEQ ID NO: 18 - DNA, 894 bp, Homo sapiens
ggaagggacagtcggccgcagaccgcgctgggttgccgctgccgctgccgccatcgtgccagcccctcgggtctccgtgaggccgggtgacgctccagaatgggagacaagccaatttgggagcagattggatccagcttcattcaacattactaccagttatttgataatgatagaacccaactaggcgcaatttacattgacgcgtcatgccttacgtgggaaggacaacagttccaggggaaagctgccattgtggagaagttgtctagccttccgttccagaaaattcagcacagcatcaccgcgcaggaccatcagcccactccagatagctgcatcatcagcatggttgtgggccagcttaaggcggatgaagaccccatcatggggttccaccagatgttcctattaaagaacatcaacgatgcttgggtttgcaccaatgacatgttcaggctcgccctgcacaactttggctgacctcctctcagctaggcactcacgctgtttcctcctccctcctcttcccaatactattcccactcctccagatgctccaaatatcatgcacaaatgagcagggccgcggtgggagtgggcgcagtgcgctgctgccactgaggtgttgtgcatgatgtttggatgctagactagttgcatctgacgggagaagtttgtgttgtaccagcgcatgccttggaaagacttaagtaatgcaaaaggttgtccttttttttttttttttttttttaatctactgacaagttgctctagtaacccaaagaagtgaaggagaaagcagctgcctcaccgcccagacattgatttgttcagatgtttcaatgcctcatgatacaataaaaccacaaaaattttcttaacaaaaaaaaa

SEQ ID NO: 19 - DNA, 1986 bp, Homo sapiens
gaggacgcgccaacatccccgctgctgtgctgggcccggggcgtgcccgccgctgctcccacctctgggccgggctggggccgcccgggggccctgttcctcggcattgcgggcctggtgggcagaaccgcggagagggcttcttttccccaagggcagcgtcttggggcccggccactggctgacccgcagcggctccggccatgcctggctggccctgggggctgctgctgacggcaggcacgctcttcgccgccctgagtcctgggccgccggcgcccgccgacccctgccacgatgaggggggtgcgccccgcggctgcgtgccaggactggtgaacgccgccctgggccgcgaggtgctggcttccagcacgtgcgggcggccggccactcgggcctgcgacgcctccgacccgcgacgggcacactcccccgccctccttacttccccagggggcacggccagccctctgtgctggcgctcggagtccctgcctcgggcgcccctcaacgtgactctcacggtgcccctgggcaaggcttttgagctggtcttcgtgagcctgcgcttctgctcagctcccccagcctccgtggccctgctcaagtctcaggaccatggccgcagctgggccccgctgggcttcttctcctcccactgtgacctggactatggccgtctgcctgcccctgccaatggcccagctggcccagggcctgaggccctgtgcttccccgcacccctggcccagcctgatggcagcggccttctggccttcagcatgcaggacagcagccccccaggcctggacctggacagcagcccagtgctccaagactgggtgaccgccaccgacgtccgtgtagtgctcacaaggcctagcacggcaggtgaccccagggacatggaggccgtcgtcccttactcctacgcagccaccgacctccaggtgggcgggcgctgcaagtgcaatggacatgcctcacggtgcctgctggacacacagggccacctgatctgcgactgtcggcatggcaccgagggccctgactgcggccgctgcaagcccttctactgcgacaggccatggcagcgggccactgcccgggaatcccacgcctgcctcgcttgctcctgcaacggccatgcccgccgctgccgcttcaacatggagctgtaccgactgtccggccgccgcagcgggggtgtctgtctcaactgccggcacaacaccgccggccgccactgccactactgccgggagggcttctatcgagaccctggccgtgccctgagtgaccgtcgggcttgcagggcctgcgactgtcacccggttggtgctgctggcaagacctgcaaccagaccacaggccagtgtccctgcaaggatggcgtcactggcctcacctgcaaccgctgcgcgcctggcttccagcaaagccgctccccagtggcgccctgtgttaagacccctatccctggacccactgaggacagcagccctgtgcagccccaggactgtgactcgcactgcaaacctgcccgtggcagctaccgcatcagcctaaagaagttctgcaagaaggactatgcggtgcaggtggcggtgggtgcgcgcggcgaggcgcgcggcgcgtggacacgcttcccggtggcggtgctcgccgtgttccggagcggagaggagcgcgcgcggcgcgggagtagcgcgctgtgggtgcccgccggggatgcggcctgcggctgcccgcgcctgctccccggccgccgctacctcctgctggggggcgggcctggagccgcggctgggggcgcggggggccgggggcccgggctcatcgccgcccgcggaagcctcgtgctaccctggagggacgcgtggacgcggcgcctgcggaggctgcagcgacgcgaacggcgggggcgctgcagcgccgcctgagcccgccggctgggcagggcggccgctgctcccacatcta

SEQ ID NO: 20 - DNA, 1263 bp, Homo sapiens
cacattaaccggcaggatgtcggaggtgcggctgccaccgctacgcgccctggacgactttgttctggggtcggcgcgtctggcggctccggatccatgcgacccgcagcgatggtgccaccgcgtcatcaacaacctcctctactaccaaaccaactaccttctctgcttcggcatcggcctcgctctcgccgggtacgtgcggccacttcatacgctcctgagcgcgctggtagtggcggtggccctcggcgtgctggtgtgggcagctgagacccgcgcagctgtgcgccgctgccgccgcagccaccctgcagcctgcctggccgcagtgcttgccgtcggcctcctggtgctctgggtcgcgggcggcgcttgcaccttcctgttcagcatcgccgggccggtgcttctgatcctggtgcacgcctcgttgcgcctgcgcaaccttaagaacaagattgagaacaagatcgagagcattggtctcaagcggacgccaatgggcctgctactagaggcactgggacaagagcaggaggctggatcctaggcccctgggatctgtacccaggacctggagaataccaccccacccccagcccataattgggacccagagccctttcccagcacttaaaacaggagcctagagccccctgcccaaacaaaacaggacatctgtgaccgccctacccccacgccagccccaaactaagatatccctcacacccagcccccattacctagggacaagagtcttccccagccttgaacctaggaccaagagccacctacatccagccccaaaactggggcttcaggccagagcatccatggccaatttcaaattgtgaacccagagacactcccatccacccttctccatgctcatccccaaactggggcctggagcaaggcactctcaaatcttgaaccctggaccaaagcttttccagaccccaccctaccttccaacccaggtcaagacattgccaaatcttgaactcagaacccaagtgttccatgcccctgtgtggatggagtcgggtatcctgactgttggacccctggtccaggtgatcccgaccctcaccagtcccatttgcctccctccagctctgcttaggcattttgcccctcaccccaatgttccacaccatcgacaaccaaggggtgaggtggggacaggcctcagcagggaatggggcgtatatgttagtgttgctgcaacaataaagcctgttgcatctctcatgccaa

SEQ ID NO: 21 - DNA, 1954 bp, Homo sapiens
cgcatgcgcaggcgacagctcatggcgttcagggcctgacggttgctagggtgacagggacacaacatggcggcgggatctctaacgctctccttcgagggaccaccacggagatcctagtgcgggaccccgcctcagggaagtggaaagcagggggacaaccttcctgcttccttcttttccgtccagtgtcggcaaggggttgtcaccggcttccgcatccaagatgaagaactataaagcaattggcaaaataggagagggaacgttttctgaagttatgaagatgcaaagcctgagagatggaaactactatgcatgtaaacaaatgaagcagcgctttgaaagtattgagcaagtcaacaacctacgagagatccaagcactgaggcgcctgaatccgcacccaaacattcttatgttgcatgaagtggtttttgacagaaaatctggttctcttgcactaatatgtgaacttatggacatgaatatttatgagctaatacgagggagaagatacccattatcagaaaaaaaaattatgcactatatgtaccagttatgtaagtccctggatcatattcacagaaatggaatatttcacagagatgtaaaaccagaaaatatactaataaagcaggatgtcctgaaattaggggactttggctcctgccggagtgtctattccaagcagccgtacacggaatacatctccacccgctggtaccgggccccggagtgtctcctcactgatgggttctacacgtacaagatggacctgtggagcgccggctgtgtgttctacgagatcgccagtctgcagcccctctttcctggagtaaatgaactggaccaaatctcaaaaatccacgatgtcatcggcacacccgctcagaagatcctcaccaagttcaaacagtcgagagctatgaattttgattttccttttaaaaagggatcaggaatacctctactaacaaccaatttgtccccacaatgcctctccctcctgcacgcaatggtggcctatgatcccgatgagagaatcgccgcccaccaggccctgcagcacccctacttccaagaacagaggaaaacagagaagcgggctctgggcagccacagaaaagctggctttccggagcaccctgtggcaccggaaccactcagtaacagctgccagatttccaaggagggcagaaagcagaaacagtccctaaagcaagaggaggaccgtcccaagagacgaggaccggcctatgtcatggaactgcccaaactaaagctttcgggagtggtcagactgtcgtcttactccagccccacgctgcagtccgtgcttggatctggaacaaatggaagagtgccggtgctgagacccttgaagtgcatccctgcgagcaagaagacagatccgcagaaggaccttaagcctgccccgcagcagtgtcgcctgcccaccatagtgcggaaaggcggaagataactgagcagcaccgtcgtctcgacttcggaggcaacaccaagcccgaccgggccaggcctgggtgatctgctgctgagacgccacggagggctggggatgcgcctgcgtccgtttcgcgctggccggggctctgggtgctgccctgcgccctgccgcacccgcggcccgcgcagctgcctaggatgttctgggctaatatacttgtaaaaccaccgcattctagggttttctttcattttcgttaagaatttggggcaggaaatactttgtaactttgtatatgaatcaaaacaaacgagcaggcatttctgtgatgtgttgggcgtggttggaaggtgggttctgcgtgtcccttcccagcgctgctggtcagtcgtggagcgccatcatgtcttaccagtgacgctgctgacacccctgacttttattaaagaataagctgtcgttaaaaaaaaaaaaaaaaaaaaa

SEQ ID NO: 22 - DNA, 1170 bp, Homo sapiens
atggcgctgacccccgagtccccgagcagcttccctgggctggccgccaccggcagctctgtgccggagccgcctggcggccccaacgcaaccctcaacagctcctgggccagcccgaccgagcccagctccctggaggacctggtggccacgggcaccattgggactctgctgtcggccatgggcgtggtgggcgtggtgggcaacgcctacacgctggtggtcacctgccgctccctgcgtgcggtggcctccatgtacgtctacgtggtcaacctggcgctggccgacctgctgtacctgctcagcatccccttcatcgtggccacctacgtcaccaaggagtggcacttcggggacgtgggctgccgcgtgctcttcggcctggacttcctgaccatgcacgccagcatcttcacgctgaccgtcatgagcagcgagcgctacgctgcggtgctgcggccgctggacaccgtgcagcgccccaagggctaccgcaagctgctggcgctgggcacctggctgctggcgctgctgctgacgctgcccgtgatgctggccatgcggctggtgcgccggggtcccaagagcctgtgcctgcccgcctggggcccgcgcgcccaccgcgcctacctgacgctgctcttcgccaccagcatcgcggggcccgggctgctcatcgggctgctctacgcgcgcctggcccgcgcctaccgccgctcgcagcgcgcctccttcaagcgggcccggcggccgggggcgcgcgcgctgcgcctggtgctgggcatcgtgctgctcttctgggcctgcttcctgcccttctggctgtggcagctgctcgcccagtaccaccaggccccgctggcgccgcggacggcgcgcatcgtcaactacctgaccacctgcctcacctacggcaacagctgcgccaaccccttcctctacacgctgctcaccaggaactaccgcgaccacctgcgcggccgcgtgcggggcccgggcagcgggggaggccgggggcccgttccctccctgcagccccgcgcccgcttccagcgctgttcgggccgctccctgtcttcctgcagcccacagcccactgacagcctcgtgctggccccagcggccccggcccgacctgcgcccgagggtcccagggccccggcgtga

SEQ ID NO: 23 - DNA, 1477 bp, Homo sapiens
gtggattttagagatacctcccctccttctgctcagctgccttgcagtaattaaactctttctctgctgcaacacccctactgttctccgtgtattggcttttctgggcagcaggaaggaaaagctgatgcgatgctctcagtgccgcgtcgccaaatactgtagtgctaagtgtcagaaaaaagcttggccagaccacaagcgggaatgcaaatgccttaaaagctgcaaacccagatatcctccagactccgttcgacttcttggcagagttgtcttcaaacttatggatggagcaccttcagaatcagagaagctttactcattttatgatctggagtcaaatattaacaaactgactgaagataagaaagagggcctcaggcaactcgtaatgacatttcaacatttcatgagagaagaaatacaggatgcctctcagctgccacctgcctttgacctttttgaagcctttgcaaaagtgatctgcaactctttcaccatctgtaatgcggagatgcaggaagttggtgttggcctatatcccagtatctctttgctcaatcacagctgtgaccccaactgttcgattgtgttcaatgggccccacctcttactgcgagcagtccgagacatcgaggtgggagaggagctcaccatctgctacctggatatgctgatgaccagtgaggagcgccggaagcagctgagggaccagtactgctttgaatgtgactgtttccgttgccaaacccaggacaaggatgctgatatgctaactggtgatgagcaagtatggaaggaagttcaagaatccctgaaaaaaattgaagaactgaaggcacactggaagtgggagcaggttctggccatgtgccaggcgatcataagcagcaattctgaacggcttcccgatatcaacatctaccagctgaaggtgctcgactgcgccatggatgcctgcatcaacctcggcctgttggaggaagccttgttctatggtactcggaccatggagccatacaggatttttttcccaggaagccatcccgtcagaggggttcaagtgatgaaagttggcaaactgcagctacatcaaggcatgtttccccaagcaatgaagaatctgagactggcttttgatattatgagagtgacacatggcagagaacacagcctgattgaagatttgattctacttttagaagaatgcgacgccaacatcagagcatcctaagggaacgcagtcagagggaaatacggcgtgtgtctttgttgaatgccttattgaggtcacacactctatgctttgttagctgtgtgaacctctcttattggaaattctgttccgtgtttgtgtaggtaaataaaggcagacatggtttgcaaaccacaagaatcattagttgtagagaagcacgattataataaattcaaaacatttggttgaggatgccaaaaaaaaaaaaaaaaaaaa

SEQ ID NO: 24 - DNA, 3007 bp, Homo sapiens
aaggagagagggagggcggagggcggaggggcggcgggaggagggcggggaggagcgctcttcctggttgggccctgccctgagctgccaccgggaagccagcctcagggactgcagcgacccccaaacacccctcccccaggatgtcggaggagatcatcacgccggtgtactgcactggggtgtcagcccaagtgcagaagcagcgggccagggagctgggcctgggccgccatgagaatgccatcaagtacctgggccaggattatgagcagctgcgggtgcgatgcctgcagagtgggaccctcttccgtgatgaggccttccccccggtaccccagagcctgggttacaaggacctgggtcccaattcctccaagacctatggcatcaagtggaagcgtcccacggaactgctgtcaaacccccagttcattgtggatggagctacccgcacagacatctgccagggagcactgggggactgctggctcttggcggccattgcctccctcactctcaacgacaccctcctgcaccgagtggttccgcacggccagagcttccagaatggctatgccggcatcttccatttccagctgtggcaatttggggagtgggtggacgtggtcgtggatgacctgctgcccatcaaggacgggaagctagtgttcgtgcactctgccgaaggcaacgagttctggagcgccctgcttgagaaggcctatgccaaggtaaatggcagctacgaggccctgtcagggggcagcacctcagagggctttgaggacttcacaggcggggttaccgagtggtacgagttgcgcaaggctcccagtgacctctaccagatcatcctcaaggcgctggagcggggctccctgctgggctgctccatagacatctccagcgttctagacatggaggccatcactttcaagaagttggtgaagggccatgcctactctgtgaccggggccaagcaggtgaactaccgaggccaggtggtgagcctgatccggatgcggaacccctggggcgaggtggagtggacgggagcctggagcgacagctcctcagagtggaacaacgtggacccatatgaacgggaccagctccgggtcaagatggaggacggggagttctggatgtcattccgagacttcatgcgggagttcacccgcctggagatctgcaacctcacacccgacgccctcaagagccggaccatccgcaaatggaacaccacactctacgaaggcacctggcggcgggggagcaccgcggggggctgccgaaactacccagccaccttctgggtgaaccctcagttcaagatccggctggatgagacggatgacccggacgactacggggaccgcgagtcaggctgcagcttcgtgctcgcccttatgcagaagcaccgtcgccgcgagcgccgcttcggccgcgacatggagactattggcttcgcggtctacgaggtccctccggagctggtgggccagccggccgtacacttgaagcgtgacttcttcctggccaatgcgtctcgggcgcgctcagagcagttcatcaacctgcgagaggtcagcacccgcttccgcctgccacccggggagtatgtggtggtgccctccaccttcgagcccaacaaggagggcgacttcgtgctgcgcttcttctcagagaagagtgctgggactgtggagctggatgaccagatccaggccaatctccccgatgagcaagtgctctcagaagaggagattgacgagaacttcaaggccctcttcaggcagctggcaggggaggacatggagatcagcgtgaaggagttgcggacaatcctcaataggatcatcagcaaacacaaagacctgcggaccaagggcttcagcctagagtcgtgccgcagcatggtgaacctcatggatcgtgatggcaatgggaagctgggcctggtggagttcaacatcctgtggaaccgcatccggaattacctgtccatcttccggaagtttgacctggacaagtcgggcagcatgagtgcctacgagatgcggatggccattgagtcggcaggcttcaagctcaacaagaagctgtacgagctcatcatcacccgctactcggagcccgacctggcggtcgactttgacaatttcgtttgctgcctggtgcggctagagaccatgttccgatttttcaaaactctggacacagatctggatggagttgtgacctttgacttgtttaagtggttgcagctgaccatgtttgcatgaggcagggactcggtcccccttgccgtgctcccctccctcctcgtctgccaagcctcgcctcctaccacaccacaccaggccaccccagctgcaagtgccttccttggagcagagaggcagcctcgtcctcctgtcccctctcctcccagccaccatcgttcatctgctccgggcagaactgtgtggcccctgcctgtgccagccatgggctcgggatggactccctgggccccacccattgccaagccaggaaggcagctttcgcttgttcctgcctcgggacagccccgggtttccccagcatcctgatgtgtcccctctccccacttcagaggccacccactcagcaccaccggcctggccttgcctgcagactataaactataaccactagctcgacacagtctgcagtccaggcgtgtggagccgcctcccggctcggggaggccccggggctgggaacgcctgtgccttcctgcgccgaagccaacgccccctctgtccttccctggccctgctgccgaccaggagctgcccagcctgtgggcggtcggccttccctccttcgctccttttttatattagtgattttaaaggggactcttcagggacttgtgtactggttatgggggtgccagaggcactaggcttggggtggggaggtcccgtgttccatatagaggaaccccaaataataaaaggccccacatctgtctgtg

SEQ ID NO: 25 - DNA, 2018 bp, Homo sapiens
gccggagctggagccggcgccagcggctggagcagcaagggagtcagggccagggccagagagccggagagaggagcccccgaccgagagcccagtgacatgtcggaccctgagatgggatgggtgcctgagcccccaaccatgacgctgggggcctctcgggtggagctgcgggtgtcctgccatggcctcctggaccgggacacactcaccaaaccccacccctgcgtgctgctcaagctctactctgatgagcagtgggtggaggtagagcgcacagaggtgcttcgctcctgttccagccctgtcttctcccgggtgctggcccttgagtatttttttgaggagaagcagcccctgcagttccacgtgttcgatgccgaggacggagccaccagcccccgaaatgataccttcctcggctctacggagtgcaccttgggccagattgtgtcacaaaccaaggtcactaagccattattgctgaagaatgggaagactgcgggcaagtccaccatcacgatcgtggccgaggaggtatcaggcacaaacgactatgtgcaactcaccttcagagcctacaagctggacaacaaggatctgttcagcaagtctgaccctttcatggaaatctataagaccaacgaggaccaaagtgatcagctggtctggagaactgaggtggtgaagaacaacctgaaccccagctgggagccgttccgcctgtccctgcattccctatgcagctgtgatgttcaccgacctctcaagttcctggtgtatgactatgactccagtgggaagcatgacttcatcggcgagttcaccagcactttccaggagatgcaggaagggacggcaaaccctgggcaggagatgcagtgggactgtatcaaccccaagtatcgggacaagaagaagaattacaagagctcagggacggtagtgctggcccagtgcacggtggagaaggtgcacaccttcctggattacatcatgggtggctgccagatcagcttcacggtggccattgacttcactgcctccaatggggacccgaggagcagccagtccctgcactgcctcagtccccgacagcccaaccactacctgcaggccctgcgtgcagtgggaggcatctgccaggactatgacagtgataagcggttcccagcttttggctttggggctcgaatcccccccaacttcgaggtgtcccatgactttgctatcaactttgacccggaaaatcctgaatgtgaagagatctcaggggtcatcgcctcctaccgtcgttgcctgccccagatccagctctacggccccaccaatgtggcccccatcatcaaccgtgtggctgagccggcccagcgggagcagagcaccggccaagccacgaagtactcggtgctgctggtgctcactgacggtgtggtgagcgacatggctgagactcgcactgctatcgtgcgtgcctcccgcctgcccatgtccatcatcatcgtaggcgtgggcaatgctgacttctctgacatgcggctgctggatggcgacgacggccccttgcgctgcccccgaggggtgcctgcagcccgagacattgtccagttcgtgcccttccgagacttcaaggatgctgccccctctgcactcgccaagtgtgtcctggctgaggtgccacggcaggtggtggagtactacgccagccagggcatcagccctggggctcccaggccctgcacactggctacgactcccagccctagcccgtgactgcctccctccggaccgacactccctcagcctctcagtgcctgtcctgaccctcgtgactccagtgaccaatgcctccacctcttggaccaggtgtgccccctgggttctggacgtgagtggtgggtcctgctcctatctctccaaaccccatacccttcaatgctgtggcccctcagtgacttccttgggtgatcctgactttctagccattaataaagagaactgctcctagcaaaaaaaaa

SEQ ID NO: 26 - DNA, 4049 bp, Homo sapiens
cctcttgcggccacaggcgcggcgtcctcggcggcgggcggcagctagcgggagccgggacgccggtgcagccgcagcgcgcggaggaacccgggtgtgccgggagctgggcggccacgtccggacgggaccgagacccctcgtagcgcattgcggcgacctcgccttccccggccgcgagcgcgccgctgcttgaaaagccgcggaacccaaggacttttctccggtccgagctcggggcgccccgcaggcgcacggtacccgtgctgcagtcgggcacgccgcggcgccgggggcctccgcagggcgatggagccggtctgcaaggaaagtgaggcgccgccgctgcgttctggaggaggggggcacaaggtctggagaccccgggtggcggacgggagccctccccccgccccgcctccggggcaccagctccggctccattgttcccgcccgggctggaggcgccgagcaccgagcgccgccgggagtcgagcgccggccgcggagctcttgcgaccccgccaggacccgaacagagcccgggggcggcgggccggagccggggacgcgggcacacgcccgctcgcacaagccacggcggactctcccgaggcggaacctccacgccgagcgagggtcagtttgaaaaggaggatcgagctcactgtggagtatccatggagatgtggagccttgtcaccaacctctaactgcagaactgggatgtggagctggaagtgcctcctcttctgggctgtgctggtcacagccacactctgcaccgctaggccgtccccgaccttgcctgaacaagcccagccctggggagcccctgtggaagtggagtccttcctggtccaccccggtgacctgctgcagcttcgctgtcggctgcgggacgatgtgcagagcatcaactggctgcgggacggggtgcagctggcggaaagcaaccgcacccgcatcacaggggaggaggtggaggtgcaggactccgtgcccgcagactccggcctctatgcttgcgtaaccagcagcccctcgggcagtgacaccacctacttctccgtcaatgtttcagatgctctcccctcctcggaggatgatgatgatgatgatgactcctcttcagaggagaaagaaacagataacaccaaaccaaaccgtatgcccgtagctccatattggacatccccagaaaagatggaaaagaaattgcatgcagtgccggctgccaagacagtgaagttcaaatgcccttccagtgggaccccaaaccccacactgcgctggttgaaaaatggcaaagaattcaaacctgaccacagaattggaggctacaaggtccgttatgccacctggagcatcataatggactctgtggtgccctctgacaagggcaactacacctgcattgtggagaatgagtacggcagcatcaaccacacataccagctggatgtcgtggagcggtcccctcaccggcccatcctgcaagcagggttgcccgccaacaaaacagtggccctgggtagcaacgtggagttcatgtgtaaggtgtacagtgacccgcagccgcacatccagtggctaaagcacatcgaggtgaatgggagcaagattggcccagacaacctgccttatgtccagatcttgaagactgctggagttaataccaccgacaaagagatggaggtgcttcacttaagaaatgtctcctttgaggacgcaggggagtatacgtgcttggcgggtaactctatcggactctcccatcactctgcatggttgaccgttctggaagccctggaagagaggccggcagtgatgacctcgcccctgtacctggagatcatcatctattgcacaggggccttcctcatctcctgcatggtggggtcggtcatcgtctacaagatgaagagtggtaccaagaagagtgacttccacagccagatggctgtgcacaagctggccaagagcatccctctgcgcagacaggtaacagtgtctgctgactccagtgcatccatgaactctggggttcttctggttcggccatcacggctctcctccagtgggactcccatgctagcaggggtctctgagtatgagcttcccgaagaccctcgctgggagctgcctcgggacagactggtcttaggcaaacccctgggagagggctgctttgggcaggtggtgttggcagaggctatcgggctggacaaggacaaacccaaccgtgtgaccaaagtggctgtgaagatgttgaagtcggacgcaacagagaaagacttgtcagacctgatctcagaaatggagatgatgaagatgatcgggaagcataagaatatcatcaacctgctgggggcctgcacgcaggatggtcccttgtatgtcatcgtggagtatgcctccaagggcaacctgcgggagtacctgcaggcccggaggcccccagggctggaatactgctacaaccccagccacaacccagaggagcagctctcctccaaggacctggtgtcctgcgcctaccaggtggcccgaggcatggagtatctggcctccaagaagtgcatacaccgagacctggcagccaggaatgtcctggtgacagaggacaatgtgatgaagatagcagactttggcctcgcacgggacattcaccacatcgactactataaaaagacaaccaacggccgactgcctgtgaagtggatggcacccgaggcattatttgaccggatctacacccaccagagtgatgtgtggtctttcggggtgctcctgtgggagatcttcactctgggcggctccccataccccggtgtgcctgtggaggaacttttcaagctgctgaaggagggtcaccgcatggacaagcccagtaactgcaccaacgagctgtacatgatgatgcgggactgctggcatgcagtgccctcacagagacccaccttcaagcagctggtggaagacctggaccgcatcgtggccttgacctccaaccaggagtacctggacctgtccatgcccctggaccagtactcccccagctttcccgacacccggagctctacgtgctcctcaggggaggattccgtcttctctcatgagccgctgcccgaggagccctgcctgccccgacacccagcccagcttgccaatggcggactcaaacgccgctgactgccacccacacgccctccccagactccaccgtcagctgtaaccctcacccacagcccctgctgggcccaccacctgtccgtccctgtcccctttcctgctggcaggagccggctgcctaccaggggccttcctgtgtggcctgccttcaccccactcagctcacctctccctccacctcctctccacctgctggtgagaggtgcaaagaggcagatctttgctgccagccacttcatcccctcccagatgttggaccaacacccctccctgccaccaggcactgcctggagggcagggagtgggagccaatgaacaggcatgcaagtgagagcttcctgagctttctcctgtcggtttggtctgttttgccttcacccataagcccctcgcactctggtggcaggtgccttgtcctcagggctacagcagtagggaggtcagtgcttcgtgcctcgattgaaggtgacctctgccccagataggtggtgccagtggcttattaattccgatactagtttgctttgctgaccaaatgcctggtaccagaggatggtgaggcgaaggccaggttgggggcagtgttgtggccctggggcccagccccaaactgggggctctgtatatagctatgaagaaaacacaaagtgtataaatctgagtatatatttacatgtctttttaaaagggtcgttaccagagatttacccatcgggtaagatgctcctggtggctgggaggcatcagttgctatatattaaaaacaaaaaagaaaaaaaaggaaaatgtttttaaaaaggtcatatattttttgctacttttgctgttttatttttttaaattatgttctaaac

SEQ ID NO: 27 - DNA, 2423 bp, Homo sapiens
gagagccgagctagcgacgagcagtcgttgcggccgccggcgccgcgggaggtggtggaggcctagccggagccgagaggtctcttgttcccgtcccacggtcccggcgtcacccctccggcgcccagtccccgtcccggaactcccgggcctgtcctgggcccccggtctgtgcactccgctcgccgcagcgcccggcccgggccgcacccgccggccccatgaggagggacgtgaacggagtgaccaagagcaggtttgagatgttctcaaatagtgatgaagctgtaatcaataaaaaacttcccaaagaactcctgttacggatattttcttttctagatgttgttaccctgtgccgctgtgctcaggtctccagggcctggaatgttctggctctggatggcagtaactggcagcgaattgacctatttgatttccagagggatattgagggccgagtagtggagaatatttcaaaacgatgtgggggctttttacgaaagttaagtcttcgtggatgtcttggagtgggagacaatgcattaagaacctttgcacaaaactgcaggaacattgaagtactgaatctaaatgggtgtacaaagacaacagacgctacatgtactagccttagcaagttctgttccaaactcaggcaccttgacttggcttcctgtacatcaataacaaacatgtctctaaaagctctgagtgagggatgtccactgttggagcagttgaacatttcctggtgtgaccaagtaaccaaggatggcattcaagcactagtgaggggctgtgggggtctcaaggccttattcttaaaaggctgcacgcagctagaagatgaagctctcaagtacataggtgcacactgccctgaactggtgactttgaacttgcagacttgcttgcaaatcacagatgaaggtctcattactatatgcagagggtgccataagttacaatccctttgtgcctctggctgctccaacatcacagatgccatcctgaatgctctaggtcagaactgcccacggcttagaatattggaagtggcaagatgttctcaattaacagatgtgggctttaccactctagccaggaattgccatgaacttgaaaagatggacctggaagagtgtgttcagataacagatagcacattaatccaactttctatacactgtcctcgacttcaagtattgagtctgtctcactgtgagctgatcacagatgatggaattcgtcacctggggaatggggcctgcgcccatgaccagctggaggtgattgagctggacaactgcccactaatcacagatgcatccctggagcacttgaagagctgtcatagccttgagcggatagaactctatgactgccagcaaatcacacgggctggaatcaagagactcaggacccatttacccaatattaaagtccacgcctacttcgcacctgtcactccacccccatcagtagggggcagcagacagcgcttctgcagatgctgcatcatcctatgacaatggaggtggtcaaccttggcgaactgagtatttaatgacacttctagagctaccgtggagtctctccagtggaagcaaccccagtgttctgagcaagggttacaaagtgagggagggcagtgtccagatccccagagccacacatacatacacatacacacccttacccccatccactctagctttgtgaccatgggactgaagtttgtgatggcttttttatcaagtagattggtaaaatttaaccattcctgttgaggtgcccataagaaaatcataggccaagatagggaggggcattccagcaaaccccgtgttaatgctactgtggtttttaaatttttgtctaggggtttctttggggattttagaacagcatctgctgtcctccggggtcaagaaaagcatggaaagacaatatatgatgtacccagggaccagaaagaaaatttctttgcatcttagaaatggtagacattcattgtgactaaagagcttctatgcttccttgtttccatgccaacatgctgagcatgctcacaaagaaggctcgtccattcctcctgtgttttagtatttggcccagaggtttcctaaatggttgccttgaaatcactgtggtccaaatgtaattcttacacactcaaattatcactgtctgtagcacacttgtgcacctgtcttacattctctgttgctcccccccacactcttgctcagtctgtcacctgttcagtctgcttactcactcaattgttacccttttgctgttgtcgtgtttacagtttgcattttgaatgattagttgggattaccaaacattttttaaaaagatattatcaataaatatttttttaattctaaattttaaaaaaaaaaaaaaaaaaa

SEQ ID NO: 28 - DNA, 2967 bp, Homo sapiens
ccggaactgcagttgctgctgcagctgaggtacagcggcggtttctgaggttcttcactcgcgactgacggagctgcggtggcgtctccacacgcaaccatgaagttgaaggacacaaaatcaaggccaaagcagtcaagctgtggcaaatttcagacaaagggaatcaaagttgtgggaaaatggaaggaagtgaagattgacccaaatatgtttgcagatggacagatggatgacttggtgtgctttgaggaattgacagattaccagttggtctcccctgccaagaatccctccagtctcttctcaaaggaagcacccaagagaaaggcacaagctgtttcagaagaagaggaggaggaggagggaaagtctagctcaccaaagaaaaagatcaagttgaagaaaagtaaaaatgtagcaactgaaggaaccagtacccagaaagaatttgaagtgaaagatcctgagctggaggcccagggagatgacatggtttgtgatgatccggaggctggggagatgacatcagaaaacctggtccaaactgctccaaaaaagaagaaaaataaagggaaaaaagggttggagccttctcagagcactgctgccaaggtgcccaaaaaagcgaagacatggattcctgaagttcatgatcagaaagcagatgtgtcagcttggaaggacctgtttgttcccaggccggttctccgagcactcagctttctaggcttctctgcacccacaccaatccaagccctgaccttggcacctgccatccgtgacaaactggacatccttggggctgctgagacaggaagtgggaaaactcttgcctttgccatcccaatgattcatgcggtgttgcagtggcagaagaggaatgctgcccctcctccaagtaacaccgaagcaccacctggagagaccagaactgaggccggagctgagactagatcaccaggcaaggctgaagctgagtctgatgcattgcctgacgatactgtaattgagagtgaagcactgcccagtgatattgcagccgaggccagagccaagactggaggcactgtctcagaccaggcgttgctctttggtgacgatgatgctggtgaagggccttcttccctgatcagggagaaacctgttcccaaacagaatgagaatgaggaggaaaatcttgataaagagcagactggaaatctaaaacaggagttggatgacaaaagcgccacctgtaaggcatatccaaagcgtcctctgcttggactggttctgactcccactcgagagctggccgtccaggtcaaacagcacattgatgctgtggccaggtttacaggaattaaaactgctattttggttggtggaatgtccacgcagaaacagcagaggatgctgaaccgtcgtcctgagattgtggttgctactccaggccggctgtgggaattaattaaagaaaagcattatcatttgaggaaccttcggcagctcaggtgcctggtagtggatgaggctgaccggatggttgagaaaggccattttgctgagctctcacagctgctagagatgctcaatgactcccaatacaacccaaagagacaaacgcttgttttttctgccacactcaccctggtgcatcaggctcctgctcgaatccttcataagaagcacaccaagaaaatggataaaacagccaaacttgacctccttatgcagaaaattggcatgaggggcaagcccaaggtcattgacctcacaaggaatgaggccacggtggagacgctaacagagaccaagatccattgtgagactgatgagaaagacttctacttgtactacttcctgatgcagtatccaggccgcagcttagtgtttgccaacagtatctcctgcatcaaacgcctctctgggctcctcaaagtccttgatatcatgcccttgaccctgcatgcctgtatgcaccagaagcagaggctcagaaacctggagcagtttgcccgtctggaagactgtgttctcttggcaacagatgtggcagctcggggtctggatattcctaaagtccagcatgtcatccattaccaggtcccacgtacctcggagatttatgtccaccgaagtggtcgaactgctcgagctaccaatgaaggcctcagtctgatgctcattgggcctgaggatgtgatcaactttaagaagatttacaaaacgctcaagaaagatgaggatatcccactgttccccgtgcagacaaaatacatggatgtggtcaaggagcgaatccgtttagctcgacagattgagaaatctgagtatcggaacttccaggcttgcctgcacaactcttggattgagcaggcagcagctgccctggagattgagctggaagaagacatgtataagggaggaaaagctgaccagcaagaagaacgtcggagacaaaagcagatgaaggttctgaagaaggagctgcgccacctgctgtcccagccactgtttacggagagccagaaaaccaagtatcccactcagtctggcaagccgcccctgcttgtgtctgccccaagtaagagcgagtctgctttgagctgtctctccaagcagaagaagaagaagacaaagaagccgaaggagccacagccggaacagccacagccaagtacaagtgcaaattaactggtcaagtgtgtcagtgactgcacattggtttctgttctctggctatttgcaaaacctctcccacccttgtgtttcactccaccaccaaccccaggtaaaaaagtctccctctcttccactcacacccatagcgggagagacctcatgcagatttgcattgttttggagtaagaattcaatgcagcagcttaatttttctgtattgcagtgtttataggcttcttgtgtgttaaacttgatttcataaattaaaaacaatggtcagaaaaaaaaaaaaaaaaaaaa

SEQ ID NO: 29 - DNA, 2111 bp, Homo sapiens
gctttcccctgcctgcctgtctctagtttctctcacatccctttttttttttcctttctctagccaccctgaagggtcccttcccaagcccttagggaccgcagaggacttggggaccagcaagcaacccccagggcacgagaagagctcttgctgtctgccctgcctcaccctgccccacgccaggcccggtggcccccagctgcatcaagtggaggcggaggaggaggcggaggagggtggcaccatgggcccgggcggtgccctccatgcccgggggatgaagacactgctgccatggacagcccgtgccagccgcagcccctaagtcaggctctccctcagttaccagggtcttcgtcagagcccttggagcctgagcctggccgggccaggatgggagtggagagttacctgccctgtcccctgctcccctcctaccactgtccaggagtgcctagtgaggcctcggcagggagtgggacccccagagccacagccacctctaccactgccagccctcttcgggacggttttggcgggcaggatggtggtgagctgcggccgctgcagagtgaaggcgctgcagcgctggtcaccaaggggtgccagcgattggcagcccagggcgcacggcctgaggcccccaaacggaaatgggccgaggatggtggggatgccccttcacccagcaaacggccctgggccaggcaagagaaccaggaggcagagcgggagggtggcatgagctgcagctgcagcagtggcagtggtgaggccagtgctgggctgatggaggaggcgctgccctctgcgcccgagcgcctggccctggactatatcgtgccctgcatgcggtactacggcatctgcgtcaaggacagcttcctgggggcagcactgggcggtcgcgtgctggccgaggtggaggccctcaaacggggtgggcgcctgcgagacgggcagctagtgagccagagggcgatcccgccgcgcagcatccgtggggaccagattgcctgggtggaaggccatgaaccaggctgtcgaagcattggtgccctcatggcccatgtggacgccgtcatccgccactgcgcagggcggctgggcagctatgtcatcaacgggcgcaccaaggccatggtggcgtgttacccaggcaacgggctcgggtacgtaaggcacgttgacaatccccacggcgatgggcgctgcatcacctgtatctattacctgaatcagaactgggacgttaaggtgcatggcggcctgctgcagatcttccctgagggccggcccgtggtagccaacatcgagccactctttgaccggttgctcattttctggtctgaccggcggaacccccacgaggtgaagccagcctatgccaccaggtacgccatcactgtctggtattttgatgccaaggagcgggcagcagccaaagacaagtatcagctagcatcaggacagaaaggtgtccaagtacctgtatcacagccgcctacgcccacctagtggccagtcccagagccgcatggcagacagcttaaatgacttcaggagagccctgggcctgtgctggctgctccttccctgccaccgctgctgcttctgactttgcctctgtcctgcctggtgtggagggctctgtctgttgctgaggaccaaggaggagaagagacctttgctgccccatcatgggggctggggttgtcacctggacagggggcagccgtggaggccaccgttaccaactgaagctgggggcctgggtcctaccctgtctggtcatgaccccattaggtatggagagctgggaggaggcattgtcacttcccaccaggatgcaggacttggggttgaggtgagtcatggcctcttgctggcaatggggtgggaggagtacccccaagtcctctcactcctccagcctggaatgtgaagtgactccccaacccctttggccatggcaggcaccttttggactgggctgccactgcttgggcagagtaaaaggtgccaggaggagcatgggtgtggaagtcctgtcagccaagaaataaaagtttacctcagagctgcaaaaaaaaaaaaaaaaaaaaaaa

SEQ ID NO: 30 - DNA, 3057 bp, Homo sapiens
cactttcgagagtgccgtctatttgccacacacttccctgatgaaatgtctggatttggactaaagaaaaaaggaaaggctagcagtcatccaacagaatcatgagacagactttgccttgtatctacttttgggggggccttttgccctttgggatgctgtgtgcatcctccaccaccaagtgcactgttagccatgaagttgctgactgcagccacctgaagttgactcaggtacccgatgatctacccacaaacataacagtgttgaaccttacccataatcaactcagaagattaccagccgccaacttcacaaggtatagccagctaactagcttggatgtaggatttaacaccatctcaaaactggagccagaattgtgccagaaacttcccatgttaaaagttttgaacctccagcacaatgagctatctcaactttctgataaaacctttgccttctgcacgaatttgactgaactccatctcatgtccaactcaatccagaaaattaaaaataatccctttgtcaagcagaagaatttaatcacattagatctgtctcataatggcttgtcatctacaaaattaggaactcaggttcagctggaaaatctccaagagcttctattatcaaacaataaaattcaagcgctaaaaagtgaagaactggatatctttgccaattcatctttaaaaaaattagagttgtcatcgaatcaaattaaagagttttctccagggtgttttcacgcaattggaagattatttggcctctttctgaacaatgtccagctgggtcccagccttacagagaagctatgtttggaattagcaaacacaagcattcggaatctgtctctgagtaacagccagctgtccaccaccagcaatacaactttcttgggactaaagtggacaaatctcactatgctcgatctttcctacaacaacttaaatgtggttggtaacgattcctttgcttggcttccacaactagaatatttcttcctagagtataataatatacagcatttgttttctcactctttgcacgggcttttcaatgtgaggtacctgaatttgaaacggtcttttactaaacaaagtatttcccttgcctcactccccaagattgatgatttttcttttcagtggctaaaatgtttggagcaccttaacatggaagataatgatattccaggcataaaaagcaatatgttcacaggattgataaacctgaaatacttaagtctatccaactcctttacaagtttgcgaactttgacaaatgaaacatttgtatcacttgctcattctcccttacacatactcaacctaaccaagaataaaatctcaaaaatagagagtgatgctttctcttggttgggccacctagaagtacttgacctgggccttaatgaaattgggcaagaactcacaggccaggaatggagaggtctagaaaatattttcgaaatctatctttcctacaacaagtacctgcagctgactaggaactcctttgccttggtcccaagccttcaacgactgatgctccgaagggtggcccttaaaaatgtggatagctctccttcaccattccagcctcttcgtaacttgaccattctggatctaagcaacaacaacatagccaacataaatgatgacatgttggagggtcttgagaaactagaaattctcgatttgcagcataacaacttagcacggctctggaaacacgcaaaccctggtggtcccatttatttcctaaagggtctgtctcacctccacatccttaacttggagtccaacggctttgacgagatcccagttgaggtcttcaaggatttatttgaactaaagatcatcgatttaggattgaataatttaaacacacttccagcatctgtctttaataatcaggtgtctctaaagtcattgaaccttcagaagaatctcataacatccgttgagaagaaggttttcgggccagctttcaggaacctgactgagttagatatgcgctttaatccctttgattgcacgtgtgaaagtattgcctggtttgttaattggattaacgagacccataccaacatccctgagctgtcaagccactacctttgcaacactccacctcactatcatgggttcccagtgagactttttgatacatcatcttgcaaagacagtgccccctttgaactctttttcatgatcaataccagtatcctgttgatttttatctttattgtacttctcatccactttgagggctggaggatatctttttattggaatgtttcagtacatcgagttcttggtttcaaagaaatagacagacagacagaacagtttgaatatgcagcatatataattcatgcctataaagataaggattgggtctgggaacatttctcttcaatggaaaaggaagaccaatctctcaaattttgtctggaagaaagggactttgaggcgggtgtttttgaactagaagcaattgttaacagcatcaaaagaagcagaaaaattatttttgttataacacaccatctattaaaagacccattatgcaaaagattcaaggtacatcatgcagttcaacaagctattgaacaaaatctggattccattatattggttttccttgaggagattccagattataaactgaaccatgcactctgtttgcgaagaggaatgtttaaatctcactgcatcttgaactggccagttcagaaagaacggataggtgcctttcgtcataaattgcaagtagcacttggatccaaaaactctgtacattaaatttatttaaatattcaattagcaaaggagaaactttctcaatttaaaaagttctatggcaaatttaagttttccataaaggtgttataatttgtttattcatatttgtaaatgattatattctatcacaattacatctcttctaggaaaatgtgtctccttatttcaggcctatttttgacaattgacttaattttacccaaaataaaacatataagcacgtaaaaaaaaaaaaaaaaaa

SEQ ID NO: 31 - DNA, 2166 bp, Homo sapiens
cggacagaggttccgggaaccagccgggccggggcggggcggggcgagggagaggggcggccgcgcggatcactgaggctgtggcggcactgcgcccggcgctcgcgtccgtccgcccgtccgcccgcccagccatgactgcgccggtccccgcgccgcggatcctgttgccgttgctgttgctgctgctgctaacgccgcctccgggtgcacgtggtgaggtgtgtatggcttcccgtggactcagcctcttccccgagtcctgtccagatttctgctgtggtacctgtgatgaccaatactgctgctctgacgtgctgaagaaatttgtgtggagcgaggaaaggtgtgctgtgcctgaggccagcgtgcctgccagtgtagagccggtggagcagctgggctcggcgctgaggtttcgccctggctacaacgaccccatgtcagggttcggagcgaccttggccgttggcctgaccatctttgtgctgtctgtcgtcactatcatcatctgcttcacctgctcctgctgctgcctttacaagacgtgccgccgaccacgtccggttgtcaccaccaccacatccaccactgtggtgcatgccccttatcctcagcctccaagtgtgccgcccagctaccctggaccaagctaccagggctaccacaccatgccgcctcagccagggatgccagcagcaccctacccaatgcagtacccaccaccttacccagcccagcccatgggcccaccggcctaccacgagaccctggctggaggagcagccgcgccctaccccgccagccagcctccttacaacccggcctacatggatgccccgaaggcggccctctgagcattccctggcctctctggctgccacttggttatgttgtgtgtgtgcgtgagtggtgtgcaggcgcggttccttacgccccatgtgtgctgtgtgtgtccaggcacggttccttacgccccatgtgtgctgtgtgtgtcctgcctgtatatgtggcttcctctgatgctgacaaggtggggaacaatccttgccagagtgggctgggaccagactttgttctcttcctcacctgaaattatgcttcctaaaatctcaagccaaactcaaagaatggggtggtggggggcaccctgtgaggtggcccctgagaggtgggggcctctccagggcacatctggagttcttctccagcttaccctagggtgaccaagtagggcctgtcacaccagggtggcgcagctttctgtgtgatgcagatgtgtcctggtttcggcagcgtagccagctgctgcttgaggccatggctcgtccccggagttgggggtacccgttgcagagccagggacatgatgcaggcgaagcttgggatctggccaagttggactttgatcctttgggcagatgtcccattgctccctggagcctgtcatgcctgttggggatcaggcagcctcctgatgccagaacacctcaggcagagccctactcagctgtacctgtctgcctggactgtcccctgtccccgcatctcccctgggaccagctggagggccacatgcacacacagcctagctgcccccagggagctctgctgcccttgctggccctgcccttcccacaggtgagcagggctcctgtccaccagcacactcagttctcttccctgcagtgttttcattttattttagccaaacattttgcctgttttctgtttcaaacatgatagttgatatgagactgaaacccctgggttgtggagggaaattggctcagagatggacaacctggcaactgtgagtccctgcttcccgacaccagcctcatggaatatgcaacaactcctgtaccccagtccacggtgttctggcagcagggacacctgggccaatgggccatctggaccaaaggtggggtgtggggccctggatggcagctctggcccagacatgaatacctcgtgttcctcctccctctattactgtttcaccagagctgtcttagctcaaatctgttgtgtttctgagtctagggtctgtacacttgtttataataaatgcaatcgtttggagctgctgccccctttcttcctggcctcggctgctggaattggaatcaggctgtactctttccatccatttgggcttct

SEQ ID NO: 32 - DNA, 599 bp, Homo sapiens
aggccgcgctcgcgccgaggggctgcgagagtgaccgcggctgctccagcgctgacgccgagccatggcggacgaggagcttgaggcgctgaggagacagaggctggccgagctgcaggccaaacacggggatcctggtgatgcggcccaacaggaagcaaagcacagggaagcagaaatgagaaacagtatcttagcccaagttctggatcagtcggcccgggccaggttaagtaacttagcacttgtaaagcctgaaaaaactaaagcagtagagaattaccttatacagatggcaagatatggacaactaagtgagaaggtatcagaacaaggtttaatagaaatccttaaaaaagtaagccaacaaacagaaaagacaacaacagtgaaattcaacagaagaaaagtaatggactctgatgaagatgacgattattgaactacaagtgctcacagactagaacttaacggaacaagtctaggacagaagttaagatctgattatttactttgtttattgtctatatgccttttaaaaaaataaacttgttatgcaaaataaaaaaaaaaaaaaaaaaaaaaaaaaaaaaaaaaaa

SEQ ID NO: 33 - DNA, 994 bp, Homo sapiens
aagactcaaacttagaaacttgaattagatgtggtattcaaatccttagctgccgcgaagacacagacagcccccgtaagaacccacgaagcaggcgaagttcattgttctcaacattctagctgctcttgctgcatttgctctggaattcttgtagagatattacttgtccttccaggctgttctttctgtagctcccttgttttctttttgtgatcatgttgcagatggctgggcagtgctcccaaaatgaatattttgacagtttgttgcatgcttgcataccttgtcaacttcgatgttcttctaatactcctcctctaacatgtcagcgttattgtaatgcaagtgtgaccaattcagtgaaaggaacgaatgcgattctctggacctgtttgggactgagcttaataatttctttggcagttttcgtgctaatgtttttgctaaggaagataaactctgaaccattaaaggacgagtttaaaaacacaggatcaggtctcctgggcatggctaacattgacctggaaaagagcaggactggtgatgaaattattcttccgagaggcctcgagtacacggtggaagaatgcacctgtgaagactgcatcaagagcaaaccgaaggtcgactctgaccattgctttccactcccagctatggaggaaggcgcaaccattcttgtcaccacgaaaacgaatgactattgcaagagcctgccagctgctttgagtgctacggagatagagaaatcaatttctgctaggtaattaaccatttcgactcgagcagtgccactttaaaaatcttttgtcagaatagatgatgtgtcagatctctttaggatgactgtatttttcagttgccgatacagctttttgtcctctaactgtggaaactctttatgttagatatatttctctaggttactgttgggagcttaatggtagaaacttccttggtttcatgattaaactcttttttttcctga

SEQ ID NO: 34 - DNA, 3520 bp, Homo sapiens
cgcgtcctgtcccggcgccttccgcgcaccggccaccgccagtctccgagccccgtgacctgcaggtcctccggccgcgactccgggccggccctgcgtggtggctgtcggggggcgcgcggggaagcagcggaacttgcggtgtgaggggccggcggggcccggagcggtccccggcccgggaaacttggaccgagaccaggccggcgaccaccaggggcctgaggatgaagccaagtctgctgtgccggcccctgtcctgcttccttatgctgctgccctggcctctcgccaccctgacatcaacaaccctttggcagtgcccacctggggaggagcccgacctggacccagggcagggcacattatgcaggccctgccccccaggcaccttctcagctgcatggggctccagcccatgccagccccatgcccgttgcagcctttggaggaggctggaggcccaggtgggcatggcaactcgagatacactctgtggagactgctggcctgggtggtttgggccttggggggttccccgcgttccatgtcaaccatgttcctgggcacctctgggtactcatggctgtgatgagtgggggcggcgggcccgacgtggcgtggaggtggcagcaggggccagcagcggtggtgagacacggcagcctgggaacggcacccgggcaggtggcccagaggagacagccgcccagtacgcggtcatcgccatcgtccctgtcttctgcctcatggggctgttgggcatcctggtgtgcaacctcctcaagcggaagggctaccactgcacggcgcacaaggaggtcgggcccggccctggaggtggaggcagtggaatcaaccctgcctaccggactgaggatgccaatgaggacaccattggggtcctggtgcgcttgatcacagagaagaaagagaatgctgcggccctggaggagctgctgaaagagtaccacagcaaacagctggtgcagacgagccacaggcctgtgtccaagctgccgccagcgcccccgaacgtgccacacatctgcccgcaccgccaccatctccacaccgtgcagggcctggcctcgctctctggcccctgctgctcccgctgtagccagaagaagtggcccgaggtgctgctgtcccctgaggctgtagccgccactactcctgttcccagccttctgcctaacccgaccagggttcccaaggccggggccaaggcagggcgtcagggcgagatcaccatcttgtctgtgggcaggttccgcgtggctcgaattcctgagcagcggacaagttcaatggtgtctgaggtgaagaccatcacggaggctgggccctcgtggggtgatctccctgactccccacagcctggcctcccccctgagcagcaggccctgctaggaagtggcggaagccgtacaaagtggctgaagcccccagcagagaacaaggccgaggagaaccgctatgtggtccggctaagtgagagcaacctggtcatctgaggggcggtctagtctaaggacactgcggccctgccctgggaggttccgaaggcttcctggaggaggtggagctgcagctgggactgtgaggaccgagaagcaatggcccagcagacgagacagcaaagaccaaggcctggaggtgggagcgtctgccccagtgaggaggcaggtggccggcgggcactgtgtacaggagcaggctgagccccgcccctggccctgctgccatgttgctcccctgaaggatgccccgacccccgtgcctgccctggctggatcctaggagcccacgggattctctgtatcatcagaggctgggcttggcagaggggaggggcctgtgcccgtcacccctggccccattccttggtaattagccacacccttgcctctgtacagggccctagagcagatgtgcgtccccctcctcttccagcaggtctataaagggaaggggtagcagaaagtcctgggctaggagagtgagtccctgggttctaatcttgggcacatctgtggccatcgctgggtccatttttctgactgtgaagtaaggagagacgtctcagtacccagggcctcttcagctctttgtaggttctgggctgggttgtgggggactggggagctgggctctaccatccctcccattagtagctttatccagccccgtttttgctgcttccagggcctctgccttcaaggcccccatggggctgtccatccatggctctgcctacggaaggggcttaatgcatgtgcctgcccctcccccagctgtttttaatgaaactgaaaaaatagacttgatcccggcaggactgtgatacagagccctagcctgcccagccagccccaagatctcaggagctttagggagaagacttggtggggctggagcacaccttgggcctcagtggtttctgtgtccctgtggtgccagtgcttctgggcagtgcaggcggctgccaggcccagccctgacttccactctggctcagcaacctggttatttatgtggggccgtgcaggcatgggcccactgcctgtccatcctgtttctcttatttattgaaactcaccattgccctatccttgtgtctccacccccttccatgtgttgaataataaaaggtgggaaagtgctgtcacgaggagctccttttctctgtgcccttcccagcttatccgcctgttccacttgtacctgtccagccctgccctgtgttgggcaccgtgacaggctgccctcccctcacagttcctgcacctcagcagccagggaagcagggcccagaggagacccatcaactcatctggttctcaccaaagcccctagctagaggcagggctgtcccacagaaatagtgtgagccacatatgtgactttaaattttctgacagtcacatttcaaaaagtaaaaagaagcaggtgaacttaatttttttttaacccagtctatccaaaatattttcatttcaatataaaatcagtataaaaagtgtgaatgagctgtttttgcttttgctttgaaatctggagtgtatcttacacatcttgattggaactcaaatatttcaagggctccatagccacgtggccagcagctaccacactggtcagcgcagcacctgaggaaatgcactgtgtggagcccgggaggtaattgggggtgaggaagatgtgcgggccagggaatgtgttccacagagagggacagcatgtgcaaaggctgagcaccaacacatagtggtcacctgggccttatgcccagggagcctccaaagcattcagctcctgcttggccagtgtggagaggaaaggagccacaggagcgggtgctacacccggcaagacagagcgtctccatctaaaattcctagggcaagcttccaacccggcccaagggccgcatgtggcccaggatatggctttgaatggggcctaacacaaattcataaactttcttaaaacattgaaaaaaaaaaaaaaaaaa

SEQ ID NO: 35 - DNA, 1463 bp, Homo sapiens
atgaacgactttgacgagtgcggccagagcgcagccagcatgtacctgccgggctgcgcctactatgtggccccgtctgacttcgctagcaagccttcgttcctttcccaaccgtcgtcctgccagatgactttcccctactcttccaacctggctccgcacgtccagcccgtgcgcgaagtggccttccgcgactacggcctggagcgcgccaagtggccgtaccgcggcggcggcggcggcggcagcgcggggggcggcagcagcgggggcggccccggcgggggcggcggcggcgcggggggctacgctccctactacgcggcggcggcggcggcggctgcggcggccgcggcggccgaggaggcggccatgcaacgcgagcttctcccgcccgcgggccgccggccggacgtgctcttcaaggcgcctgagccggtgtgcgctgcgccggggccgccgcacggccccgcgggcgccgcctccaacttctacagcgcggtgggccgcaatggcatcttgccacagggcttcgaccagttctacgaggcagcgcccgggcccccgttcgccgggccgcagcccccgccgccacccgcgccgccacagcccgagggcgcagccgacaagggcgaccccaggaccggggctggtggcggcgggggcagtccctgcaccaaggcgacccctggctcggagcccaagggggcagcagaaggcagcggtggcgacggcgagggccccccgggagaggcgggggccgagaagagcagcagcgcagttgccccccagcggtcccggaaaaagcgctgtccctataccaagtaccagatccgcgaactggaacgcgagtttttctttaacgtgtacataaacaaagagaaaagacttcaactctctcggatgctcaacctcactgaccggcaagtcaaaatctggttccagaatcgcaggatgaaagaaaagaaactgaacagagaccgtctgcagtatttcactggaaaccccttattttgagagctccaggaagcgccctcaccccagccccactcacccaccctccttcccaccagcctgctctccgcaggcccactgtccttgggtttaatgacgtctcttctctgtggaacttcacgattccttcccacggtcaactcgggacctcccagcgaccactgcagcctgcggacgaggccgggacttggccgagcggatcctaataaggggaaaatggtaaatgcaaacgtcccgttacaattttaccgccagtgtgctgtcgttccccctccccctctccgagtcctcgtggggacacggcggggtctgtaggaagttgggccgggttgggggttgctagaaggcgctggtgttttgctctgagttttaagagatcccttccttcctcttcggtgaatgcaggttatttaaactttgggaaatgtacttttagtctgtcatatcaa

SEQ ID NO: 36 - DNA, 2117 bp, Homo sapiens
ttcctccatcagcctggctggcagcagccttggactccgcccgtggagccctgggcctgttgacccaccagcttaggagcacccaccaagctctgggtaaggaagctcaccttctggggctcttctgggaaaatagaggtcaacgtggaggtaccaggccaccatgctcagtctcaagctgccccaacttcttcaagtccaccaggtcccccgggtgttctgggaagatggcatcatgtctggctaccgccgccccaccagctcggctttggactgtgtcctcagctccttccagatgaccaacgagacggtcaacatctggactcacttcctgcccacctggtgaggggaggctctgccccaggccgcggccttgagctcagagggggtacccaggcgggcagggaccgtccaggcccacgggctgcagcggcagtcgcgggggtccgcggcggcctgagcacgcgcccgccgcaggtacttcctgtggcggctcctggcgctggcgggcggccccggcttccgtgcggagccgtaccactggccgctgctggtcttcctgctgcccgcctgcctctaccccttcgcgtcgtgctgcgcgcacaccttcagctccatgtcgccccgcatgcgccacatctgctacttcctcgactacggcgcgctcagcctctacagtctgggctgcgccttcccctatgccgcctactccatgccggcctcctggctgcacggccacctgcaccagttctttgtgcctgccgccgcactcaactccttcctgtgcaccggcctctcctgctactcccgtttcctggagctggaaagccctgggctcagtaaggtcctccgcacaggagccttcgcctatccattcctgttcgacaacctcccactcttttatcggctcgggctgtgctggggcaggggccacggctgtgggcaggaggccctgagcaccagccatggctaccatctcttctgcgcgctgctcactggcttcctcttcgcctcccacctgcctgaaaggctggcaccaggacgctttgattacatcggtgagggcacgcctggcccggcccgggaagaggcaggggcagatgccttcccagagcacagaatgaactgggccacagccaccagttattccacatctgtgcagtgctgggcacccacttccagctggaggcagtgctggctgatatgggatcacgcagagcctggctggccacacaggaacctgccctgggcctggcaggcacagtggccacactggtcttggctgcagctgggaacctactcattattgctgctttcacagccaccctgcttcgggcccccagtacatgccctctgctgcagggtggcccactggaggggggtacccaggccaaacaacagtgaggccccatccctgaccctgtcctggagggggcagaggccaggccccagtgctgacgaggagcccagatttgggcctaatcaggtggggacgcatctcagcctggaaccaacaggggctgaggagagagggcacaggagagagggcagagaagaggaggggtgtctagggggactggcagagtgtgagagggaccgtgagggggctcttgatgggagtggaagaagtgctgagggtctgagaggggagatgcatgcgtgtccaggctgaagatgcccctatattctgtcaaaggttggcggggggaggtgttggggtcctttcatctggctccgtttctggtgcttctggaagtctctgctcagcacagggaagaactaacacgactaacctaggcctaccctgaatgcttcttgctaaccaggccgagaggccacacacttgcccccccatccccacaaaccaggtaatgccagtttgccagcagctatttgcctatagagatgagtctgtcctggtcataactgtgtgctcaaggtgtccaggcttttgggggtgggcctatctgggtgcattatggatggtttggtggattgaggtgtggggaggagggtcctaggctagagggggtatccctagttagactttgggaagccaccttcaatgttttctggaacaaggcaggtacaaataaaaaaataaaactttggaaagc

SEQ ID NO: 37 - DNA, 1669 bp, Homo sapiens
ctccctcagcaaggacagcagaggaccagctaagagggagagaagcaactacagaccccccctgaaaacaaccctcagacgccacatcccctgacaagctgccaggcaggttctcttcctctcacatactgacccacggctccaccctctctcccctggaaaggacaccatgagcactgaaagcatgatccgggacgtggagctggccgaggaggcgctccccaagaagacaggggggccccagggctccaggcggtgcttgttcctcagcctcttctccttcctgatcgtggcaggcgccaccacgctcttctgcctgctgcactttggagtgatcggcccccagagggaagagttccccagggacctctctctaatcagccctctggcccaggcagtcagatcatcttctcgaaccccgagtgacaagcctgtagcccatgttgtagcaaaccctcaagctgaggggcagctccagtggctgaaccgccgggccaatgccctcctggccaatggcgtggagctgagagataaccagctggtggtgccatcagagggcctgtacctcatctactcccaggtcctcttcaagggccaaggctgcccctccacccatgtgctcctcacccacaccatcagccgcatcgccgtctcctaccagaccaaggtcaacctcctctctgccatcaagagcccctgccagagggagaccccagagggggctgaggccaagccctggtatgagcccatctatctgggaggggtcttccagctggagaagggtgaccgactcagcgctgagatcaatcggcccgactatctcgactttgccgagtctgggcaggtctactttgggatcattgccctgtgaggaggacgaacatccaaccttcccaaacgcctcccctgccccaatccctttattaccccctccttcagacaccctcaacctcttctggctcaaaaagagaattgggggcttagggtcggaacccaagcttagaactttaagcaacaagaccaccacttcgaaacctgggattcaggaatgtgtggcctgcacagtgaagtgctggcaaccactaagaattcaaactggggcctccagaactcactggggcctacagctttgatccctgacatctggaatctggagaccagggagcctttggttctggccagaatgctgcaggacttgagaagacctcacctagaaattgacacaagtggaccttaggccttcctctctccagatgtttccagacttccttgagacacggagcccagccctccccatggagccagctccctctatttatgtttgcacttgtgattatttattatttatttattatttatttatttacagatgaatgtatttatttgggagaccggggtatcctgggggacccaatgtaggagctgccttggctcagacatgttttccgtgaaaacggagctgaacaataggctgttcccatgtagccccctggcctctgtgccttcttttgattatgttttttaaaatatttatctgattaagttgtctaaacaatgctgatttggtgaccaactgtcactcattgctgagcctctgctccccaggggagttgtgtctgtaatcgccctactattcagtggcgagaaataaagtttgcttagaaaagaa

SEQ ID NO: 38 - DNA, 1414 bp, Homo sapiens
gccaggaccctggaaggaagcaggatggcagccggaacagcagttggagcctgggtgctggtcctcagtctgtggggggcagtagtaggtgctcaaaacatcacagcccggattggcgagccactggtgctgaagtgtaagggggcccccaagaaaccaccccagcggctggaatggaaactgaacacaggccggacagaagcttggaaggtcctgtctccccagggaggaggcccctgggacagtgtggctcgtgtccttcccaacggctccctcttccttccggctgtcgggatccaggatgaggggattttccggtgccaggcaatgaacaggaatggaaaggagaccaagtccaactaccgagtccgtgtctaccagattcctgggaagccagaaattgtagattctgcctctgaactcacggctggtgttcccaataaggtggggacatgtgtgtcagagggaagctaccctgcagggactcttagctggcacttggatgggaagcccctggtgcctaatgagaagggagtatctgtgaaggaacagaccaggagacaccctgagacagggctcttcacactgcagtcggagctaatggtgaccccagcccggggaggagatccccgtcccaccttctcctgtagcttcagcccaggccttccccgacaccgggccttgcgcacagcccccatccagccccgtgtctgggagcctgtgcctctggaggaggtccaattggtggtggagccagaaggtggagcagtagctcctggtggaaccgtaaccctgacctgtgaagtccctgcccagccctctcctcaaatccactggatgaaggatggtgtgcccttgccccttccccccagccctgtgctgatcctccctgagatagggcctcaggaccagggaacctacagctgtgtggccacccattccagccacgggccccaggaaagccgtgctgtcagcatcagcatcatcgaaccaggcgaggaggggccaactgcaggctctgtgggaggatcagggctgggaactctagccctggccctggggatcctgggaggcctggggacagccgccctgctcattggggtcatcttgtggcaaaggcggcaacgccgaggagaggagaggaaggccccagaaaaccaggaggaagaggaggagcgtgcagaactgaatcagtcggaggaacctgaggcaggcgagagtagtactggagggccttgaggggcccacagacagatcccatccatcagctcccttttctttttcccttgaactgttctggcctcagaccaactctctcctgtataatctctctcctgtataaccccaccttgccaagctttcttctacaaccagagccccccacaatgatgattaaacacctgacacatcttga

SEQ ID NO: 39 - DNA, 2910 bp, Homo sapiens
acttgaggagtcgactgagagctttatctttgcccctgtgacgggtggcctgtggtttcctgccaacaactcctgtttccggaggcccaacaaggcccacgcagagccaggaggggcagtggggctgggcctgggtggccccaccagccccgccccatctatctttgggaatttatttgtccatgggcgaggctggcctgcagtctgttgccttccaggggccaagagctgctctgatcacccagggattctctctccaacccaagtgcctccagctgacctctggctcctgtcctctggctccacctgcaccgccctgctcttcctaaggggccaggaagcccccagaagctctaccatcgacgtgggtggtggcacccggctcaccctgagagcagaggccgtgcagggggctcagttctgagccccagccggcccaccatggcacggcggttccaggaggagctggccgccttcctcttcgagtatgacaccccccgcatggtgctggtgcgtaataagaaggtgggcgttatcttccgactgatccagctggtggtcctggtctacgtcatcgggtgggtgtttctctatgagaagggctaccagacctcgagcggcctcatcagcagtgtctctgtgaaactcaagggcctggccgtgacccagctccctggcctcggcccccaggtctgggatgtggctgactacgtcttcccagcccagggggacaactccttcgtggtcatgaccaatttcatcgtgaccccgaagcagactcaaggctactgcgcagagcacccagaagggggcatatgcaaggaagacagtggctgtacccctgggaaggccaagaggaaggcccaaggcatccgcacgggcaagtgtgtggccttcaacgacactgtgaagacgtgtgagatctttggctggtgccccgtggaggtggatgacgacatcccgcgccctgcccttctccgagaggccgagaacttcactcttttcatcaagaacagcatcagctttccacgcttcaaggtcaacaggcgcaacctggtggaggaggtgaatgctgcccacatgaagacctgcctctttcacaagaccctgcaccccctgtgcccagtcttccagcttggctacgtggtgcaagagtcaggccagaacttcagcaccctggctgagaagggtggagtggttggcatcaccatcgactggcactgtgacctggactggcacgtacggcactgcagacccatctatgagttccatgggctgtacgaagagaaaaatctctccccaggcttcaacttcaggtttgccaggcactttgtggagaacgggaccaactaccgtcacctcttcaaggtgtttgggattcgctttgacatcctggtggacggcaaggccgggaagtttgacatcatccctacaatgaccaccatcggctctggaattggcatctttggggtggccacagttctctgtgacctgctgctgcttcacatcctgcctaagaggcactactacaagcagaagaagttcaaatacgctgaggacatggggccaggggcggctgagcgtgacctcgcagctaccagctccaccctgggcctgcaggagaacatgaggacatcctgatgctcgggccccaactcctgactgggtgcagcgtgaggcttcagcctggagccctggtgggtcccagccagggcagaggggcctccccaggaagtctcctaccctctcagccaggcagagagcagtttgccagaagctcagggtgcatagtaggagagacctgtgcaaatctgagctccggctccgaccccacacaccctgagggagccctaccctagcctcagccgctcctggtggggaatggctggggctgggcaggaccctcccacacacctgcaccctagcttcgtgcttctctctccggactctcattatccaacccgctgcctccatttctctagatctgtgctctccgatgtggcagtcagtaaccataggtgactaaattaaactaaaataaaatagaatgaaacacaaaattcaattcctcggctgaactagccacatttcaactgctcagtagatacgtgtggttagtggctgccatactggacagctcggggcattttcactgtcaaagaaagttctattagacagccctgcttgagccctgtttcttcctggccttcggtttccctggggaacttatcgacaatgcaagctcctgggcccacccccagacctcctgaaccaaaagctccagggctggccgtatgatctgtgtggatggcaaactccccaggccattctgggacctaagtttaagaagtgccgtcctcgaactttctgactctaagctcctgagcgggagtcagacttagccctgagcctgcacttcctgttcaggtgcagacactgaacagggtctcaaacaccttcagcatgtgtgttgtgtgctcacgtgccacacagtgtctcatgcacacaacccagtgtacacaccacctacgtgcacacagcatccttccacactgtgtatgtgaacagcttgggccctgcaaacacaaccatctacacacatctacacccccaagcacacacacatggtccgtgccatgtcacctccatagggaaaggcttctctccaagtgtgccaggccaggacagccctcccagccatgaatccttactcagctacctcgggttggggtgggagccccagccaaatcctgggctccctgcctgtggctcagccccagctcccaaggcctgcctggctctgtctgaacagaaggtctgggggaagcgacgggtggagtacaataaagggaatgaggacaaacaaaaaaaaaaaaaaaaaaaaaaaaaaaaaaaaaaaaaaaaaaaaaa

SEQ ID NO: 40 - DNA, 2594 bp, Homo sapiens
cggaggctcggccacaacgccactggattggtggtagggcggggcgggccacagtctccagcctgaagcggaagtggaggaaagatggaggaccatcagcacgtgcccatcgacatccagaccagcaagctgctcgattggctggtggacagaaggcactgcagcctgaaatggcagagtctggtgctgacgatccgcgagaagatcaatgctgccatccaggacatgccagagagcgaagagatcgcccagctgctgtctgggtcctacattcactactttcactgcctaagaatcctggaccttctcaaaggcacagaggcctccacgaagaatatttttggccgatactcttcacagcggatgaaggattggcaggagattatagctctgtatgagaaggacaacacctacttaggtaaagtggcccggcctgggagccctggtatccatggggaagcccactctcagagttctgagataccaggcttataggaggcacagtctgtgagtgggaagagactggagtgtagatgttgcccatttgtaggtggtaaaatcaattgtttttgatggaattgattttccctgagtggagtgctgggggaaggaggaggtccaggccggtagtggccattcgccgtgcctcagcgagcaggtgtgtgtgggtcctccaccactcacctcttggttagcgggagtgtgctgcccccacccccacccccgcacccccattctacacaaggcagaagaggcacgggttttcctgggagcgaatatcaagtgcctgagagcaactacaggactaactgtgtttgggttgggtgtagtataaataataataatggctaatatttcctgagcatctactaaatgcaaggaattgtgcttggtgtgtcatgtggattctctcttgcatcttcatgataaatgttattgtcgctgttttaccgatgagggttggattagaggggttaaacaacttgtcttaggctccacagctgggaacaagtggggctgggaagctgacttcgtgctcttcaccaccacaaaggatgtgtgtgcatcctggggcatgcctgcctcatgtgggggtgtcctgggctgaatttcctgggcacttctcagtggaactctctagcctcctggttcggaatgtcaactatgagatcccctcactgaagaagcagattgccaagtgccagcagctgcagcaagaatacagccgcaaggaggaggagtgccaggcaggggctgccgagatgcgggagcagttctaccactcctgcaagcagtatggcatcacgggcgaaaatgtccgaggagaactgctggccctggtgaaggacctgccgagtcagctggctgagattggggcagcggctcagcagtccctgggggaagccattgacgtgtaccaggcgtctgtggggtttgtgtgtgagagccccacagagcaggtgttgccaatgctgcggttcgtgcagaagcggggaaactcaacggtgtacgagtggaggacagggacagagccctctgtggtggaacgaccccacctcgaggagcttcctgagcaggtggcagaagatgcgattgactggggcgactttggggtagaggcagtgtctgaggggactgactctggcatctctgccgaggctgctggaatcgactggggcatcttcccggaatcagattcaaaggatcctggaggtgatgggatagactggggagacgatgctgttgctttgcagatcacagtgctggaagcaggaacccaggctccagaaggtgttgccaggggcccagatgccctgacactgcttgaatacactgagacccggaatcagttccttgatgagctcatggagcttgagatcttcttagcccagagagcagtggagttgagtgaggaggcagatgtcctgtctgtgagccagttccagctggctccagccatcctgcagggccagaccaaagagaagatggttaccatggtgtcagtgctggaggatctgattggcaagcttaccagtcttcagctgcaacacctgtttatgatcctggcctcaccaaggtatgtggaccgagtgactgaattcctccagcaaaagctgaagcagtcccagctgctggctttgaagaaagagctgatggtgcagaagcagcaggaggcacttgaggagcaggcggctctggagcctaagctggacctgctactggagaagaccaaggagctgcagaagctgattgaagctgacatctccaagaggtacagcgggcgccctgtgaacctgatgggaacctctctgtgacaccctccgtgttcttgcctgcccatcttctccgcttttgggatgaagatgatagccagggctgttgttttggggcccttcaaggcaaaagaccaggctgactggaagatggaaagccacaggaaggaagcggcacctgatggtgatcttggcactctccatgttctctacaagaagctgtggtgattggccctgtggtctaccaggcgaaaaccacagattctccttctagttagtatagcggacttaataaaagaggaaaaaactcttgcttcagta

SEQ ID NO: 41 - DNA, 1191 bp, Homo sapiens
agtctccagcatcctccacctgtctaccaccgagcatgggcctatatttgaagccttagatctctccagcacagtaagcaccaggagtccatgaagaagatggctcctgccatggaatcccctactctactgtgtgtagccttactgttcttcgctccagatggcgtgttagcagtccctcagaaacctaaggtctccttgaaccctccatggaatagaatatttaaaggagagaatgtgactcttacatgtaatgggaacaatttctttgaagtcagttccaccaaatggttccacaatggcagcctttcagaagagacaaattcaagtttgaatattgtgaatgccaaatttgaagacagtggagaatacaaatgtcagcaccaacaagttaatgagagtgaacctgtgtacctggaagtcttcagtgactggctgctccttcaggcctctgctgaggtggtgatggagggccagcccctcttcctcaggtgccatggttggaggaactgggatgtgtacaaggtgatctattataaggatggtgaagctctcaagtactggtatgagaaccacaacatctccattacaaatgccacagttgaagacagtggaacctactactgtacgggcaaagtgtggcagctggactatgagtctgagcccctcaacattactgtaataaaagctccgcgtgagaagtactggctacaattttttatcccattgttggtggtgattctgtttgctgtggacacaggattatttatctcaactcagcagcaggtcacatttctcttgaagattaagagaaccaggaaaggcttcagacttctgaacccacatcctaagccaaaccccaaaaacaactgatataattactcaagaaatatttgcaacattagtttttttccagcatcagcaattgctactcaattgtcaaacacagcttgcaatatacatagaaacgtctgtgctcaaggatttatagaaatgcttcattaaactgagtgaaactggttaagtggcatgtaatagtaagtgctcaattaacattggttgaataaatgagagaatgaatagattcatttattagcatttgtaaaagagatgttcaatttcaataaaataaatataaaaccatgtaacagaatgcttctgagtaaaaaaaaaaaaaaaaaaaaaaaaaaa

SEQ ID NO: 42 - DNA, 1816 bp, Homo sapiens
ggagggggagggagtggggttgaggcaagatggcggctaaggtggcgaagctgcggcggcggcggctggagtgagcgcccagctcgccgcgctgccgagcgagggccgggcggagggccgcgcgccggggccgcgccccggtcgtccggccgtggggcgcgccggctctcactccgccagctcccggttgcttcctagaaacatggttgtttgttggacttgatctcacagcccagtgaggacgtctttactgataatgtcaagttcaggttaccctcccaaccaaggagctttcagcacagagcaaagtcgttatccttcacattctgtccagtatacctttcccagtacccgacaccagcaggaatttgcagttcctgactaccgctcttctcatattgaagttagccaggcatcacagcttttacagcagcagcagcagcagcagcagcttcgaagacgaccttccttgctttcagaatttcacccgggttctgacaggcctcaagaaaggagaactggatatgaacagtttcactcaggaccctcaccggtggatcatgattccttggagtccaagcgcccacgcctggagccagtttctgatgcccatttccagcgtgttagtgctgcggttttacctttagttcactcgctgccagaaggcttgaggtcgtctgcagatgctaagaaggattcagcatttggaagcaaacatgaagctccatcctctcctttggctgggcaaccatgtggagatgaccaaaatgcttcaccttcaaagctttcaaaggaggagttaatacagagtatggaccgggtagaccgagagattgcaaaagtagagcagcagatccttaaattgaaaaagaaacaacaacagctagaagaagaagcagctaagccccctgaaccagagaagcctgtgtcccctcctcctgtggaacaaaaacaccgtagtattgtccaaattatttatgatgagaatcggaaaaaagcagaagaagctcataaaatatttgaaggtcttggcccaaaagttgaactgccactctataaccagccatcagataccaaggtgtaccatgagaacatcaagactggagtacctgcaaggcgcatgatgaagtaagataatgaagctttttcatttaagactagtgatgacaccgtcccccaccaagccacatctgccattgcaaagtagaagtgccacggatcattttatcattattcaaaaccctattctagggaaatcccttccatgactcttgctaatgacggtatttgtagacccttctgccatttaatgtcctggtgccttggaaggctcagtcccctcatgtgggtgaggaggctgttccagaatgtagtttgctttgccttgctcatcctagtaccaggccttttatggatgcagatcttggaataagaaaataagtgaaaaatgaacttaatttcttgatctgattgaagtaagagaagctagataggcttttttttaaaaaaaaattgttgtttaattatcatacttttagagaattttaggtgaagtattaacagttggtgacaaaaatgtgatatttctatttatttgcatttaaaagtatatcagaacctaaaatgatttactattacagttactaatgagcacattatttatatttttccttttacgttctgagaatgtgtacaataattgactactttgcagaactggtggcaaatatatgtgcatggtagtatgcatgactattacaatttagtcattttaatttctgttaagtatgtagttcataattaaagtcatctattc

SEQ ID NO: 43 - DNA, 1416 bp, Homo sapiens
aagttcgggtccgtagtgggctaagggggagggtttcaaagggagcgcacttccgctgccctttctttcgccagccttacgggcccgaaccctcgtgtgaagggtgcagtacctaagccggagcggggtagaggcgggccggcacccccttctgacctccagtgccgccggcctcaagatcagacatggcccagaacttgaaggacttggcgggacggctgcccgccgggccccggggcatgggcacggccctgaagctgttgctgggggccggcgccgtggcctacggtgtgcgcgaatctgtgttcaccgtggaaggcgggcacagagccatcttcttcaatcggatcggtggagtgcagcaggacactatcctggccgagggccttcacttcaggatcccttggttccagtaccccattatctatgacattcgggccagacctcgaaaaatctcctcccctacaggctccaaagacctacagatggtgaatatctccctgcgagtgttgtctcgacccaatgctcaggagcttcctagcatgtaccagcgcctagggctggactacgaggaacgagtgttgccgtccattgtcaacgaggtgctcaagagtgtggtggccaagttcaatgcctcacagctgatcacccagcgggcccaggtatccctgttgatccgccgggagctgacagagagggccaaggacttcagcctcatcctggatgatgtggccatcacagagctgagctttagccgagagtacacagctgctgtagaagccaaacaagtggcccagcaggaggcccagcgggcccaattcttggtagaaaaagcaaagcaggaacagcggcagaaaattgtgcaggccgagggtgaggccgaggctgccaagatgcttggagaagcactgagcaagaaccctggctacatcaaacttcgcaagattcgagcagcccagaatatctccaagacgatcgccacatcacagaatcgtatctatctcacagctgacaaccttgtgctgaacctacaggatgaaagtttcaccaggggaagtgacagcctcatcaagggtaagaaatgagcctagtcaccaagaactccacccccagaggaagtggatctgcttctccagtttttgaggagccagccaggggtccagcacagccctaccccgccccagtatcatgcgatggtcccccacaccggttccctgaacccctcttggattaaggaagactgaagactagccccttttctgggaaattactttcctcctccctgtgttaactggggctgttggggacagtgcgtgatttctcagtgatttcctacagtgttgttccctccctcaaggctgggaggagataaacaccaacccaggaattctcaataaatttttattacttaacctg

SEQ ID NO: 44 - DNA, 507 bp, Homo sapiens
cgccgctgcgctggtaagcctgtgttttggttcgctatggcccgtactaagcagactgctcgcaagtcgaccggcggcaaggccccgaggaagcagctggccaccaaggcggcccgcaagagcgcgccggccacgggcggggtgaagaagccgcaccgctaccggcccggcaccgtagccctgcgggagatccggcgctaccagaagtccacggagctgctgatccgcaagctgcccttccagcggctggtacgcgagatcgcgcaggactttaagacggacctgcgcttccagagctcggccgtgatggcgctgcaggaggccagcgaggcctacctggtggggctgttcgaagacacgaacctgtgcgccatccacgccaagcgcgtgaccattatgcccaaggacatccagctggcccgccgcatccgtggagagcgggcttaagaagtggcggttcggccggaggttccatcgtatccaaaaggctcttttcagagccaccca

SEQ ID NO: 45 - DNA, 1443 bp, Homo sapiens
aaccattgtgatggtctagataagtgtacatgcttaggccttctgaagcagcatttgaagctgcagtcctgaaaaccatgcaggccggaagagtagataaagaaatatttatttgagatggcacatgtttcttcagaaactcaagatgtttcccccaaagatgaattaactgcttcagaagcctccactaggtctccattgtgtgaacacaccttccctggggactcagacttacggtcaatgattgaagaacatgcttttcaggttttgtcacaaggatccttgttagaaagtccaagttacacagtttgtgtctctgagccagataaagatgatgattttctttctctgaactttcccaggaaactttggaaaatagtggaaagtgaccaattcaagtctatttcatgggatgagaatggaacttgcatagtgattaatgaagaactcttcaagaaagaaattttggaaacaaaggctccttacagaatatttcaaactgatgctatcaaaagttttgttcgacagctcaacctttatggatttagtaaaattcaacagaattttcaaagatctgcctttctagccacctttctgtcagaagagaaagaatcgtctgtcttaagcaagttaaagttctattataatccaaatttcaagcgtggctatccccaacttttagtaagagtgaagagaagaattggtgttaaaaatgcttcacctatatctactttattcaacgaagatttcaacaagaagcattttagagcaggggctaacatggagaatcataattctgccttagctgctgaagctagtgaagaaagtttattttcagcctctaaaaatttaaatatgcctctaacaagggaatcttctgtcagacagataattgcaaattcatctgtccccattagaagtggtttccctcctccttcaccttcaacctcagttggaccatcagaacaaattgcaacagatcaacatgctattttaaatcagttgaccactattcatatgcactctcatagtacctacatgcaagcaaggggccacattgtgaattttattacaaccacaacttctcaataccacatcatatctcccttacaaaatggttattttgggctgacagtggaaccatctgctgttcccacacgatatcctctggtatcagtcaatgaggctccatatcgtaacatgctaccagcaggcaacccgtggttgcaaatgcctacgatcgctgatagatcagctgcccctcattccaggctagctcttcaaccatcaccactggacaaatatcaccctaattacaactgatctgccattaaaagaggaccagattatgaatgacaacagagactaacatttacattgacaaaaaaccctaaaaatttctgcaattatcttattgaacaataaaattgcatgtttacttct

SEQ ID NO: 46 - DNA, 1024 bp, Homo sapiens
cttcctggctcctccttcctccccacccctctaataggctcataagtgggctcaggcctctctgcggggctcactctgcgcttcaccatggctttcattgccaagtccttctatgacctcagtgccatcagcctggatggggagaaggtagatttcaatacgttccggggcagggccgtgctgattgagaatgtggcttcgctctgaggcacaaccacccgggacttcacccagctcaacgagctgcaatgccgctttcccaggcgcctggtggtccttggcttcccttgcaaccaatttggacatcaggagaactgtcagaatgaggagatcctgaacagtctcaagtatgtccgtcctgggggtggataccagcccaccttcacccttgtccaaaaatgtgaggtgaatgggcagaacgagcatcctgtcttcgcctacctgaaggacaagctcccctacccttatgatgacccattttccctcatgaccgatcccaagctcatcatttggagccctgtgcgccgctcagatgtggcctggaactttgagaagttcctcatagggccggagggagagcccttccgacgctacagccgcaccttcccaaccatcaacattgagcctgacatcaagcgcctccttaaagttgccatatagatgtgaactgctcaacacacagatctcctactccatccagtcctgaggagccttaggatgcagcatgccttcaggagacactgctggacctcagcattcccttgatatcagtccccttcactgcagagccttgcctttcccctctgcctgtttccttttcctctcccaaccctctggttggtgattcaacttgggctccaagacttgggtaagctctgggccttcacagaatgatggcaccttcctaaaccctcatgggtggtgtctgagaggcgtgaagggcctggagccactctgctagaagagaccaataaagggcaggtgtggaaacggcaaaaaaaaaaaaaaaaaaaaaaaaaaaaaa

SEQ ID NO: 47 - DNA, 2669 bp, Homo sapiens
aaaagagtctcgccggcgtccccgcccgcacactcgcgcacactcgcgctcgggcgcacacggagcagggaccggcgcccggagcgagccagggagcggctaaccggggacccaccgcgcggagccagcctagctgccagcgagcccaacccgcgacgacccacgcccctgagccccgcagccgacccctgccggccggtgtccccaccgccatccctgacccatggcgctgaagaggattcagaaagaattgagtgatctacagcgcgatccacctgctcactgttcagctggacctgtgggagatgacttgttccactggcaagccactattatggggcctcctgatagcgcatatcaaggtggagtcttctttctcactgtacattttccgacagattatccttttaaaccaccaaagattgctttcacaacaaaaatttaccatccaaacataaacagtaatggaagtatttgtctcgatattctgaggtcacaatggtcaccagctctgactgtatcaaaagttttattgtccatatgttctctactttgtgatcctaatccagatgaccccttagtaccagatattgcacaaatctataaatcagacaaagaaaaatacaacagacatgcaagagaatggactcagaaatatgcaatgtaaaaatcaaaaacattttcatatataccagagtactgtaaaatctaggtttttttcaacattagcagtaaattgagcactgtttactgtttcattgtaccatgaaaccatttgatttttacccattttaaatgtgtttctgaagcaagacaaaacaaacttccaaaaatacccttaagactgtgatgagagcatttatcattttgtatgcattgagaaagacatttattatggtttttaagatacttggacatctgcatcttcagcttacaagatctacaatgcagctgaaaagcaaccaaattattttttgctgaaactagatgtttttacatgagaaatactgtatgtgttgtctaagatgtcagttttataaatctgtattcagatttcattctttgttagctcactttataatttgtatttttttactgtatagactaaatatattctatttacatgtatgtcaactcattacttttttcctgtgaacagtattgaaaaaccccaacggctgataattaagtgaattaactgtgtctcccttgtcttaggatattctgtagattgattgcagatttcttaaatctgaaatgatctttacactgtaattctcagcatactgattatggagaaacacttgttttgattttgttatacttgacttaactttattgcaatgtgaattaattgcactgctaagtaggaagatgtgtaacttttatttgttgctattcacatttgaattttttcctgtataggcaatattatattgacaccttttacagatcttactgtagctttttccatataaataaaatgctttttctactatttgtcttgattacttaaaaaaataaaaatataagtaaggatcaaaactctaaaattttgcatgaaaattacatccaaattgtgaaaatcagatctattttgtttgccattagtcaccattagttatataaattttattgttttaggttagtatctctttactaaattgtcagtctataagataatatatgttgatcccttgctgtagaggagaatttagagtaatttggggtttgtcttggattatatctaaatggattatttgttaaaagtactgaaatgagtataaggcagtatcacccatccaaaagaaaggtctttatagacctgcacagtcactagattaattcattaaaatgcccccaccctgatgtaattgacattacatttcttaacattttaaaatctagaatttctaaaatggaatttaatgccatcacaatttgaaaaactttttttttttttttactatagaagttacaaaggaagttctaaaattatgcctccctctgtttttataagttgccatcgaaaagtgatttaaataagcaggttatctttatagattttaaagaaaactagaaagttttaatgttttaacttggggaaaaatacatctctttaatgtttagcatgcttgtcaaccttgagtgagtgtcatttttaagaacagttgtagcccttctgattattgcagtagctgtagaagtatgtaagaatatgtgatgggtgtagtcattagcaaagcatttaaatcacttgagtattttgtcatggttcattattattaaagcacaaaataacctattgttagaaaatatgtgtttttataaatgaatgtaaaataattaaatgaattgtgaaatggatgtttaagaaaatataggcttaaaaagtaaatctataaaatgatgtcttaaaacagccatatcatgaaaaattctacttagctatattattataagctacatttgccctgaatttgaacactcaacatcactagatttaaatatttagtatattttgatagtaaagggttttgtttcttgaatatcttcactttaaacaaaaaaaaaaaacaactttcatttgtgtggcatttatttttggaagtgtcttcttttttttctttattaaagtttttgaaacttgcaaaaaaaaaaaaaaaaaa

SEQ ID NO: 48 - DNA, 1587 bp, Homo sapiens
cattcttcttcttcctcccagcagctctgcctggaagtcccccaatccctgtgctcctgcccccagatcgtgggcttgggggacagcaagaaagctgcaaaggactcagctggggcggctccacaaggaccccacaggcttgaggtgttgccaggattctatcccagggggttttctgggtcccccagagccctctcaagcacggggaggcagaagggtcctcgcccatttcaggaatctgcagcctggaagccacagccatggcaggcccccgatacccagtttcagtgcaaggggcagccctggtgcagatcaagaggctccaaacgtttgccttctctgtgcgctggtcagacggcagcgacaccttcgtgcgcaggagttgggacgaattcaggcagctcaagaccctcaaggagaccttcccggtggaggcgggcctgctgcggagatctgaccgcgttctcccaaagcttctcgatgcaccactgttgggacgcgtggggcgcacgagccgcggcctggcgcgcctgcagctgttggaaacctattctcggaggctgctggcgactgcagagcgcgtggcacggagcccgacgatcactggcttcttcgcaccgcaacccctggacctggagcccgcgctgccacccggcagccgggtgatcctgcccaccccagaggagcagcctctttctcgcgctgcgggccgcctctccatccacagtctggaggctcagagcctgcgctgcctgcagcccttctgtacccaggacacgcgggataggccttttcaggcgcaggcccaggagagcctggacgtgctgctgcggcacccctcaggctggtggctggtggagaacgaagaccggcagaccgcctggtttccagcgccctacctggaggaggcggccccgggccaaggccgggagggaggcccgtccctagggagcagcggtccccagttctgtgcttcccgcgcctacgagagcagccgcgcagatgagctgtccgtgcccgcgggggcgcgcgtgcgcgtgttggaaacgtcagaccgcggctggtggctatgcaggtacggcgaccgggcgggcctactccccgcggtgctgctgcggccggaagggctgggcgctctcctgagcgggacggggttccgtggaggagacgacccggcgggtgaggcccggggcttccctgaaccctcccaggccaccgcccctccccccaccgtgcccacccgaccttcgccgggcgccatccagagccgctgctgcaccgtcacacgcagggccctggagcggcgcccacggcgccagggccgccctcgagggtgcgtggactctgtgccgcaccccacgacggagcagtgagcgcgaggatcccgatgaggggatggaccgcgccatcccagggctggggaggagcggggagggcggatctccctggccagcagggatgggagggggccatttgctgttcctctgagtaaagcttgttctgcatgaaaaaaaaaaaaaaaaaaaaaaaaaaaaaaaaaaaaaaaaaaaaaaaaaaaaaaaaaaaaaaaaaaaaaaaaaaaaaaaa

SEQ ID NO: 49 - DNA, 1943 bp, Homo sapiens
gggaacgtggctggttggaggaggtagatcaccctttctgcgggggacgatttcgtcggtggtaggctgctaccatgaggttgaatcagaacaccttgctgctggggaagaaggtggtccttgtaccctacacctcggagcatgtgcccagcaggtaccacgagtggatgaaatcagaggagctgcagcgtttgacagcctcggagccgctgaccctggagcaggagtatgccatgcagtgcagctggcaggaagatgcagacaagtgtaccttcattgtgctggatgccgagaagtggcaggcccagccaggcgccaccgaagagagctgcatggtgggagatgtgaacctcttcctcacagatctagaagacctcaccttgggggagatcgaggtcatgattgcagagcccagctgcaggggtaagggccttggcactgaggccgttctcgcgatgctgtcttacggagtgaccacgctaggtctgaccaagtttgaggctaaaattgggcaaggaaatgaaccaagcatccggatgttccagaaacttcactttgagcaggtggctacgagcagtgtttttcaggaggtgaccctcagactgacagtgagtgagtccgagcatcagtggcttctggagcagaccagccacgtggaagagaagccttacagagatgggtcggcagagccctgctgatggctgggccttgtgggcagccactctgtgtgagcagggtgttgggcccatacacttcaaagaccagagccctgcactgggagagtgctcctggcccaggctgggaatcacctttcgaggcccttcagactctggcggggcttgctgtggcctccctccagctagtggtgtggctgagcagactccagggccagggccagttcccttctcccctcccggccaaacccagacccagactctaggaagctggaatggagggcagggatccatgggagatgtcgggatgaaggtgggagctggaggtgcagggggacctggaacatggatgggagtggacaggcctttctccttagaggccagaggtgctgccctggctgggagtgaagctccaggcactaccagctttcctgattttcccgtttggtccatgtgaagagctaccacgagccccagcctcacagtgtccactcaagggcagcttggtcctcttgtcctgcagaggcaggctggtgtgaccctgggaacttgacccgggaacaacaggtggtccagagtgagtgtggcctggcccctcaacctagtgtccgtcctcctctctcctggagccagtcttgagtttaaaggcattagtgttagatacagctccttgtggctggaaaacacccctctgctgataaagctcagggggcactgaggaagcagaggccccttgggggtgccctcctgaagagagcgtcaggccatcagctctgtccctctggtgctcccacgtctgttcctcaccctccatctctgggagcagctgcacctgactggccacgcgggggcagtggaggcacaggctcagggtggccgggctacctggcaccctatggcttacaaagtagagttggcccagtttccttccacctgaggggagcactctgactcctaacagtcttccttgccctgccatcatctggggtggctggctgtcaagaaaggccgggcatgctttctaaacacagccacaggaggcttgtagggcatcttccaggtggggaaacagtcttagataagtaaggtgacttgcctaaggcctcccagcacccttgatcttggagtctcacagcagactgcatgtgaacaactggaaccgaaaacatgcctcagtataaaacaaacattataaaacgaaaaaaaaaaaaaaaaaaaaaaaaaaaaaaaaaaaaaaaaaaaaaaaaaaaaaaaaaaaaaaaaaaaaaa

SEQ ID NO: 50 - DNA, 2401 bp, Homo sapiens
agcctcccgcccgccgcctctgtctccctctctccacaaactgcccaggagtgagtagctgctttcggtccgccggacacaccggacagatagacgtgcggacggcccaccaccccagcccgccaactagtcagcctgcgcctggcgcctcccctctccaggtccatccgccatgtggcccctgtggcgcctcgtgtctctgctggccctgagccaggccctgccctttgagcagagaggcttctgggacttcaccctggacgatgggccattcatgatgaacgatgaggaagcttcgggcgctgacacctcgggcgtcctggacccggactctgtcacacccacctacagcgccatgtgtcctttcggctgccactgccacctgcgggtggttcagtgctccgacctgggtctgaagtctgtgcccaaagagatctcccctgacaccacgctgctggacctgcagaacaacgacatctccgagctccgcaaggatgacttcaagggtctccagcacctctacgccctcgtcctggtgaacaacaagatctccaagatccatgagaaggccttcagcccactgcggaagctgcagaagctctacatctccaagaaccacctggtggagatcccgcccaacctacccagctccctggtggagctccgcatccacgacaaccgcatccgcaaggtgcccaagggagtgttcagcgggctccggaacatgaactgcatcgagatgggcgggaacccactggagaacagtggctttgaacctggagccttcgatggcctgaagctcaactacctgcgcatctcagaggccaagctgactggcatccccaaagacctccctgagaccctgaatgaactccacctagaccacaacaaaatccaggccatcgaactggaggacctgcttcgctactccaagctgtacaggctgggcctaggccacaaccagatcaggatgatcgagaacgggagcctgagcttcctgcccaccctccgggagctccacttggacaacaacaagttggccagggtgccctcagggctcccagacctcaagctcctccaggtggtctatctgcactccaacaacatcaccaaagtgggtgtcaacgacttctgtcccatgggcttcggggtgaagcgggcctactacaacggcatcagcctcttcaacaaccccgtgccctactgggaggtgcagccggccactttccgctgcgtcactgaccgcctggccatccagtttggcaactacaaaaagtagaggcagctgcagccaccgcggggcctcagtgggggtctctggggaacacagccagacatcctgatggggaggcagagccaggaagctaagccagggcccagctgcgtccaacccagccccccacctcgggtccctgaccccagctcgatgccccatcaccgcctctccctggctcccaagggtgcaggtgggcgcaaggcccggcccccatcacatgttcccttggcctcagagctgcccctgctctcccaccacagccacccagaggcaccccatgaagcttttttctcgttcactcccaaacccaagtgtccaaggctccagtcctaggagaacagtccctgggtcagcagccaggaggcggtccataagaatggggacagtgggctctgccagggctgccgcacctgtccagacacacatgttctgttcctcctcctcatgcatttccagcctttcaaccctccccgactctgcggctcccctcagcccccttgcaagttcatggcctgtccctcccagacccctgctccactggcccttcgaccagtcctcccttctgttctctctttccccgtccttcctctctctctctctctctctctctctctctttctgtgtgtgtgtgtgtgtgtgtgtgtgtgtgtgtgtgtgtgtgtgtcttgtgcttcctcagacctttctcgcttctgagcttggtggcctgttccctccatctctccgaacctggcttcgcctgtccctttcactccacaccctctggccttctgccttgagctgggactgctttctgtctgtccggcctgcacccagcccctgcccacaaaaccccagggacagcggtctccccagcctgccctgctcaggccttgcccccaaacctgtactgtcccggaggaggttgggaggtggaggcccagcatcccgcgcagatgacaccatcaaccgccagagtcccagacaccggttttcctagaagcccctcacccccactggcccactggtggctaggtctccccttatccttctggtccagcgcaaggaggggctgcttctgaggtcggtggctgtctttccattaaagaaacaccgtgcaacgtgaaaaaaaaaaaaaaaaaaaaa

SEQ ID NO: 51 - DNA, 4104 bp, Homo sapiens
gtgagagagtgagcgagacagaaagagagagaagtgcaccagcgagccggggcaggaagaggaggtttcgccaccggagcggcccggcgacgcgctgacagcttcccctgcccttcccgtcggtcgggccgccagccgccgcagccctcggcctgcacgcagccaccggccccgctcccggagcccagcgccgccgaggccgcagccgcccggccagtaaggcggcgccgccgcccggccaccgcgcgccctgcgcttccctccgcccgcgctgcggccatggcgcggcgctgactggcctggcccggccccgccgcgctcccgctcgccccgacccgcactcgggcccgcccgggctccggcctgccgccgcctcttccttctccagccggcaggcccgcgccgcttaggagggagagcccacccgcgccaggaggccgaacgcggactcgccacccggcttcagaatggcagaagatgatccatatttgggaaggcctgaacaaatgtttcatttggatccttctttgactcatacaatatttaatccagaagtatttcaaccacagatggcactgccaacagcagatggcccataccttcaaatattagagcaacctaaacagagaggatttcgtttccgttatgtatgtgaaggcccatcccatggtggactacctggtgcctctagtgaaaagaacaagaagtcttaccctcaggtcaaaatctgcaactatgtgggaccagcaaaggttattgttcagttggtcacaaatggaaaaaatatccacctgcatgcccacagcctggtgggaaaacactgtgaggatgggatctgcactgtaactgctggacccaaggacatggtggtcggcttcgcaaacctgggtatacttcatgtgacaaagaaaaaagtatttgaaacactggaagcacgaatgacagaggcgtgtataaggggctataatcctggactcttggtgcaccctgaccttgcctatttgcaagcagaaggtggaggggaccggcagctgggagatcgggaaaaagagctaatccgccaagcagctctgcagcagaccaaggagatggacctcagcgtggtgcggctcatgtttacagcttttcttccggatagcactggcagcttcacaaggcgcctggaacccgtggtatcagacgccatctatgacagtaaagcccccaatgcatccaacttgaaaattgtaagaatggacaggacagctggatgtgtgactggaggggaggaaatttatcttctttgtgacaaagttcagaaagatgacatccagattcgattttatgaagaggaagaaaatggtggagtctgggaaggatttggagatttttcccccacagatgttcatagacaatttgccattgtcttcaaaactccaaagtataaagatattaatattacaaaaccagcctctgtgtttgtccagcttcggaggaaatctgacttggaaactagtgaaccaaaacctttcctctactatcctgaaatcaaagataaagaagaagtgcagaggaaacgtcagaagctcatgcccaatttttcggatagtttcggcggtggtagtggtgccggagctggaggcggaggcatgtttggtagtggcggtggaggagggggcactggaagtacaggtccagggtatagcttcccacactatggatttcctacttatggtgggattactttccatcctggaactactaaatctaatgctgggatgaagcatggaaccatggacactgaatctaaaaaggaccctgaaggttgtgacaaaagtgatgacaaaaacactgtaaacctctttgggaaagttattgaaaccacagagcaagatcaggagcccagcgaggccaccgttgggaatggtgaggtcactctaacgtatgcaacaggaacaaaagaagagagtgctggagttcaggataacctctttctagagaaggctatgcagcttgcaaagaggcatgccaatgcccttttcgactacgcggtgacaggagacgtgaagatgctgctggccgtccagcgccatctcactgctgtgcaggatgagaatggggacagtgtcttacacttagcaatcatccaccttcattctcaacttgtgagggatctactagaagtcacatctggtttgatttctgatgacattatcaacatgagaaatgatctgtaccagacgcccttgcacttggcagtgatcactaagcaggaagatgtggtggaggatttgctgagggctggggccgacctgagccttctggaccgcttgggtaactctgttttgcacctagctgccaaagaaggacatgataaagttctcagtatcttactcaagcacaaaaaggcagcactacttcttgaccaccccaacggggacggtctgaatgccattcatctagccatgatgagcaatagcctgccatgtttgctgctgctggtggccgctggggctgacgtcaatgctcaggagcagaagtccgggcgcacagcactgcacctggctgtggagcacgacaacatctcattggcaggctgcctgctcctggagggtgatgcccatgtggacagtactacctacgatggaaccacacccctgcatatagcagctgggagagggtccaccaggctggcagctcttctcaaagcagcaggagcagatcccctggtggagaactttgagcctctctatgacctggatgactcttgggaaaatgcaggagaggatgaaggagttgtgcctggaaccacgcctctagatatggccaccagctggcaggtatttgacatattaaatgggaaaccatatgagccagagtttacatctgatgatttactagcacaaggagacatgaaacagctggctgaagatgtgaagctgcagctgtataagttactagaaattcctgatccagacaaaaactgggctactctggcgcagaaattaggtctggggatacttaataatgccttccggctgagtcctgctccttccaaaacacttatggacaactatgaggtctctgggggtacagtcagagagctggtggaggccctgagacaaatgggctacaccgaagcaattgaagtgatccaggcagcctccagcccagtgaagaccacctctcaggcccactcgctgcctctctcgcctgcctccacaaggcagcaaatagacgagctccgagacagtgacagtgtctgcgacagcggcgtggagacatccttccgcaaactcagctttaccgagtctctgaccagtggtgcctcactgctaactctcaacaaaatgccccatgattatgggcaggaaggacctctagaaggcaaaatttagcctgctgacaatttcccacaccgtgtaaaccaaagccctaaaattccactgcgttgtccacaagacagaagctgaagtgcatccaaaggtgctcagagagccggcccgcctgaatcattctcgatttaactcgagaccttttcaacttggcttcctttcttggttcataaatgaattttagtttggttcacttacagatagtatctagcaatcacaacactggctgagcggatgcatctggggatgaggttgcttactaagctttgccagctgctgctggatcacagctgctttctgttgtcattgctgttgtccctctgctacgttcctattgtcattaaaggtatcacggtcgccacctggcattccttctgaccacagcatcattttgcattcaaattaagggttaagaaaagagatattttaaaatgagagtcacttgatgtgccattttaaaaaaaaaggcatattgctttttctaatgtggttatttctctgatttgcaaaaaaaaaaaaaaaaaaaaaatacttgtcaatatttaaacatggttacaatcattgctgaaaatggtattttcccccttttctgcattttgctattgtaaatatgttttttagatcaaatactttaaaggaaaaaatgttggatttataaatgctattttttattttacttttataataaaaggaaaagcaaattgatgacctcaaaaaaaaaaaaaaaaaa

SEQ ID NO: 52 - DNA, 3040 bp, Homo sapiens
aaatcctcctcctccgccatcatccgccgcggtgcggagagcaggtggtgctggaagcgcgtgaggccgggagctcgagagagctaacagactagccggctggacatctggaccgctggatccggaggtggcgaccccggcctgacccggaccctaaatccgtccccgccccagagggcggaggcgcgcgctcgattccccccacgcggcggcgccgcctgtttacgtctgcagatctccaggggagcccaccagcctagtcaacatggcctcggaagacattgccaagctggcagagacacttgccaagactcaggtggccgggggacagctgagtttcaaaggcaagagcctcaaactcaacactgcagaagatgctaaagatgtgattaaagagattgaagactttgacagcttggaggctctgcgtctggaaggcaacacagtgggcgtggaagcagccagggtcatcgccaaggccttagagaagaagtcggagttgaagcgctgccactggagtgacatgttcacgggaaggctgcggaccgagatcccaccagccctgatctcactaggggaaggactcatcacagctggggctcagctggtggagctggacttaagcgacaacgcattcgggcccgacggtgtgcaaggcttcgaggccctgctcaagagctcagcctgcttcaccctgcaggaactcaagctcaacaactgtggcatgggcattggcggcggcaagatcctggctgcagctctgaccgaatgtcaccggaaatccagtgcccaaggcaagcctctggccctgaaggtctttgtggctggcagaaaccgtctggagaatgatggcgccactgccttggcagaagcttttagggtcatcgggaccctggaggaggtccacatgccacagaatgggatcaaccaccctggcatcactgccctggcccaggctttcgctgtcaaccccctgctgcgggtcatcaacctgaatgacaacaccttcactgagaagggcgccgtggccatggccgagaccttgaagaccttgcggcaggtggaggtgattaattttggggactgcctggtgcgctccaagggtgcagttgccattgcagatgccatccgcggcggcctgcccaagctaaaggagctgaacttgtcattctgtgaaatcaagagggatgctgccctggctgttgctgaggccatggcagacaaagctgagctggagaagctggacctgaatggcaacaccctgggagaagaaggctgtgaacagcttcaggaggtgctggagggcttcaacatggccaaggtgctggcgtccctcagtgatgacgaggacgaggaggaggaggaggaaggagaagaggaagaagaggaagcagaagaagaggaggaggaagatgaggaagaggaggaagaagaggaggaggaggaggaagaagagcctcagcagcgagggcagggagagaagtcagccacgccctcacggaagattctggaccctaacactggggagccagctcccgtgctgtcctccccacctcctgcagacgtctccaccttcctggcttttccctctccagagaagctgctgcgcctagggcccaagagctccgtgctgatagcccagcagactgacacgtctgaccccgagaaggtggtctctgccttcctaaaggtgtcatctgtgttcaaggacgaagctactgtgaggatggcagtgcaggatgcagtagatgccctgatgcagaaggctttcaactcctcgtccttcaactccaacaccttcctcaccaggctgctcgtgcacatgggtctgctcaagagtgaagacaaggtcaaggccattgccaacctgtacggccccctgatggcgctgaaccacatggtgcagcaggactatttccccaaggcccttgcacccctgctgctggcgttcgtgaccaagcccaacagcgccctggaatcctgctccttcgcccgccacagtctgctgcagacgctgtacaaggtctagactcaaagcctctcccatcccttggcctggaccagtgagctggggagggactcggatgaactgaggcgcagcctacgccattgccttggacaggactctggccacaggcagggcgggtctgtgtcccatgtgtcctgtcagtcccctgagtatgtgtgtgggtgtggcgcatgtgcaggtctgtgcctcctgtcgggatttgggttttaacgtcttctgctggcccagccctgctctgttgtggggagttggcccccaggggaaagggctgtgagctgctccgccattaaactcacctccacctgagggcgctctgctgatctccgcctgggccctgatggccgtccccacccacctgccttccggcccggctccctggcggagccagaacccagggagttgcccgcgtgctgtccttcccctctgtgttgtgattgggttgtttcctgccctgcctggggctgcttctcgtcaccaagccctggtcctgcggcagctgtcacccctaccatccataccactgtgctgaccgctcagcctgaagagcagagaatgccatgggtgggactgtgggggtcggatcgtggggttgttggcagagggcaaccctgggccccacaccgtgtggacaggcagacaccagattgtccaggagcaggagctgctgggactgcgctggccccggacctagtgggccttctcctggctgctgagatgtcgtctgtgactggcctggctggagggggagtgttgacaacccaaagctgttctccagtctggggagggagaggcagggtccccaatgtccgagctgcatctggacgctgctcttaaaggacctcctggggcaggggagcggtagggtctggactgggcagatgctgtatgacctccctgagcacccgtgactgccccatgctttcccctttgtgctctgtgtgtgtctgggctgtgcccgggggcttcacaaataaagtcgtgtggcagcttcaaaaaaaaaaaaaaaaaaaa

SEQ ID NO: 53 - DNA, 2346 bp, Homo sapiens
acaaggcagcctcgctcgagcgcaggccaatcggctttctagctagagggtttaactcctatttaaaaagaagaacctttgaattctaacggctgagctcttggaagacttgggtccttgggtcgcaggtgggagccgacgggtgggtagaccgtgggggatatctcagtggcggacgaggacggcggggacaaggggcggctggtcggagtggcggagcgtcaagtcccctgtcggttcctccgtccctgagtgtccttggcgctgccttgtgcccgcccagcgcctttgcatccgctcctgggcaccgaggcgccctgtaggatactgcttgttacttattacagctagaggcatcatggaccgatctaaagaaaactgcatttcaggacctgttaaggctacagctccagttggaggtccaaaacgtgttctcgtgactcagcaatttccttgtcagaatccattacctgtaaatagtggccaggctcagcgggtcttgtgtccttcaaattcttcccagcgcattcctttgcaagcacaaaagcttgtctccagtcacaagccggttcagaatcagaagcagaagcaattgcaggcaaccagtgtacctcatcctgtctccaggccactgaataacacccaaaagagcaagcagcccctgccatcggcacctgaaaataatcctgaggaggaactggcatcaaaacagaaaaatgaagaatcaaaaaagaggcagtgggctttggaagactttgaaattggtcgccctctgggtaaaggaaagtttggtaatgtttatttggcaagagaaaagcaaagcaagtttattctggctcttaaagtgttatttaaagctcagctggagaaagccggagtggagcatcagctcagaagagaagtagaaatacagtcccaccttcggcatcctaatattcttagactgtatggttatttccatgatgctaccagagtctacctaattctggaatatgcaccacttggaacagtttatagagaacttcagaaactttcaaagtttgatgagcagagaactgctacttatataacagaattggcaaatgccctgtcttactgtcattcgaagagagttattcatagagacattaagccagagaacttacttcttggatcagctggagagcttaaaattgcagattttgggtggtcagtacatgctccatcttccaggaggaccactctctgtggcaccctggactacctgccccctgaaatgattgaaggtcggatgcatgatgagaaggtggatctctggagccttggagttctttgctatgaatttttagttgggaagcctccttttgaggcaaacacataccaagagacctacaaaagaatatcacgggttgaattcacattccctgactttgtaacagagggagccagggacctcatttcaagactgttgaagcataatcccagccagaggccaatgctcagagaagtacttgaacacccctggatcacagcaaattcatcaaaaccatcaaattgccaaaacaaagaatcagctagcaaacagtcttaggaatcgtgcagggggagaaatccttgagccagggctgccatataacctgacaggaacatgctactgaagtttattttaccattgactgctgccctcaatctagaacgctacacaagaaatatttgttttactcagcaggtgtgccttaacctccctattcagaaagctccacatcaataaacatgacactctgaagtgaaagtagccacgagaattgtgctacttatactggttcataatctggaggcaaggttcgactgcagccgccccgtcagcctgtgctaggcatggtgtcttcacaggaggcaaatccagagcctggctgtggggaaagtgaccactctgccctgaccccgatcagttaaggagctgtgcaataaccttcctagtacctgagtgagtgtgtaacttattgggttggcgaagcctggtaaagctgttggaatgagtatgtgattctttttaagtatgaaaataaagatatatgtacagacttgtattttttctctggtggcattcctttaggaatgctgtgtgtctgtccggcaccccggtaggcctgattgggtttctagtcctccttaaccacttatctcccatatgagagtgtgaaaaataggaacacgtgctctacctccatttagggatttgcttgggatacagaagaggccatgtgtctcagagctgttaagggcttatttttttaaaacattggagtcatagcatgtgtgtaaactttaaatatgcaaataaataagtatctatgtctaaaaaaa

SEQ ID NO: 54 - DNA, 2349 bp, Homo sapiens
cttctccgcctccgcctcctcccgacgccggcgccgctttctggaaggttcgtgaaggcagtgagggcttaccgttattacactgcggccggccagaatccgggtccatccgtccttcccgagccaacccagacacagcggagtttgccatgcccgagaatgtggcaccccggagcggggcgactgccggggctgccggcggccgcgggaaaggcgcctatcaggaccgcgacaagccagcccagatccgcttcagcaacatttccgccgccaaagcggttgctgatgctattagaacaagccttggaccaaaaggaatggataaaatgattcaagatggaaaaggtgatgtaaccattacaaatgatggtgctaccattctgaaacaaatgcaagtattacatccagcagccagaatgctggtggagctgtctaaggctcaagatatagaagcaggagatggcaccacatcagtagtcatcattgctggctccctcttagattcttgtaccaagcttcttcagaaagggattcatccaaccatcatttctgagtcattccagaaggccctggaaaagggcattgaaatcttgactgacatgtctcgacctgtggaactgagtgacagagaaactttgttaaatagtgcaaccacttcactgaactcaaaggtggtttctcagtattcaagtctgctttctccaatgagtgtaaatgcagtgatgaaagtgattgacccagccacagccaccagtgtagatcttagagatattaaaatagttaagaagcttggtgggacaattgatgactgtgagttggtggaagggctggttctcacccaaaaagtgtcaaattctggcataaccagagttgaaaaggccaagattgggcttattcagttttgcttatctgctcccaaaacagacatggataatcaaatagtggtttctgactatgcccagatggaccgagtgctgcgagaagagagagcctatattttaaatttagtgaagcaaattaaaaaaacaggatgtaatgtccttctcatacagaaatctattctaagagatgctcttagtgatcttgcattacactttctgaataaaatgaagatcatggtgattaaggatattgaaagagaagacattgaattcatttgtaagacaattggaaccaagccagttgctcatattgaccaatttactgctgacatgctgggttctgctgagttagctgaggaggtcaatttaaatggttctggcaaactgctcaagattacaggctgtgccagccctggaaaaacagttacaattgttgttcgtggttctaacaaactggtgattgaagaagctgagcgctccattcatgatgccctatgtgttattcgttgtttagtgaagaagagggctcttattgcaggaggtggtgctccagaaatagagttggccctacgattaactgaatattcacgaacactgagtggtatggaatcctactgcgttcgtgcttttgcagatgctatggaggtcattccatctacactagctgaaaatgccggcctgaatcccatttctacagtaacagaactaagaaaccggcatgcccagggagaaaaaactgcaggcattaatgtccgaaagggtggtatttccaacattttggaggaactggttgtccagcctctgttggtatcagtcagtgctctgactcttgcaactgaaactgttcggagcattctgaaaatagatgatgtggtaaacactcgataatctggataactgactagcaccattatgatcaccagtattgtggctggaatggaagaagatcaccttggtgttccttgtttggaagattatttcctctgaatttctgggcttggtcttccagttggcatttgcctgaagttgtattgaaacaatttaatgaaaatattaaatatttggtttcaaaaggcagatttatcttctcccaacattctgttatttctgatacttttgaaaaactaataaaaactaataaaagaagcgtaaaaagtgagtttacatgttgaggaaaaaaatggcccaatatgctcatcactgataaatgctccctggccttaaaaactaccaacatataatatatatgctgtcttaaaagttaatgatccaagtggcacctctctgaacctactttggcttgggaggctgcccagttaaaacaaaaataagttaatggtacagaaagagaatgaaaaatgaaagcctccttttatcctatcatcctaattccttttcccagtaataatgactgctgtgttggattccttctgcaaataaaagtgtatacataaaaaaaaaaaaaaaa

SEQ ID NO: 55 - DNA, 3959 bp, Homo sapiens
acactgcgtccggggccagacgacgatatcagcgcggggtccccacaacgccatggggcagagccaactctcgagcgcgtgatcgaagcccgcagttttttcgcccccgtcacttccgggtgcgacaatctcttctgtccggccagccgctggagtcgttaggtgccgccttgcttctgacgagccacacgtttgcttcttccctgtgttcccagctggagggacatgagtgtccctgggccgtcgtctccggacggggccctgacacggccaccctactgcctggaggccggggagccgacgcctggtttaagtgacacttctccagatgaagggttaatagaggacttgactatagaagacaaagcagtggagcaactggcagaaggattgctttctcattatttgccagatctgcagagatcaaaacaagccctccaggaactcacacagaaccaagttgtattgttagacacactggaacaagagatttcaaaatttaaagaatgtcattctatgttggatattaatgctttgtttgctgaggctaaacactatcatgccaagttggtgaatataagaaaagagatgctgatgcttcatgaaaaaacatcaaagttaaaaaaaagagcacttaaactgcagcagaagaggcaaaaagaagagttggaaagggagcagcaacgagagaaggagtttgaaagagaaaagcagttaactgccagaccagccaaaaggatgtgaaaagttgtgtttgtgtgttttcttctcctgtcccatatttgggttatgatgactcaagtgtagactgaagttgaggtagtgccttatgccattatgtcatatgttgaaatccttattccggtattactgtgtctccatgccttttttccaagtagcagacgtcatgttgcatggtttttgatatttatatgtaagtttttcaaattttgcttaattttaaaatttattattttgatcttgaattatttataaactggaaagtggtttgattattgtgagtcaaaactctaagtggttaaaaattagtatgaattttttagcttcttaatgaatatggatttaaaactctccagttcttattttatgaaatgacttgcctttctggtaatacaatgctgattttttagtaattgccttttcattactttgttaagaagaaatgccagctgtttaatcacacctacccctggaaaagaggtaaaccttttgaacagttgaatttcatcagaagctctatagctttttggtgagaggaagtgatactctttattacaagaaacaaggaattaacaaaaataaggaacttgttgctacctttcttttctgttgaacattaaaaataatttggtttgtggactgggcatggtggcttatggaaaagaggtgagcctttgtgaagaacataatggaaaagtgcatgtacgggaaataacagcactttaggtgtagttcaggtgagcaagatgccagatagtttctactaaccatatactctttctgcttcttagcgtcgttgtcactgcttctgtggcttttgggttcaaagtagattatatatattcctaaagcttggtggaggtagtggagctatcacacactcaaatgagcttgtatatttataatacaatatagtattatagtaacagttatcatacactgagatatagtttctgtgcttgtaaaaaattcttgaagtgaggccgggtgcggtggctcatgcctgtaatcccaacgctttgggacgccgaggcgggtggatcatgaggtcaaaagattgagaccatcctggccaacatggtgaaaccccgtctctactagaaatacaaaaattagctgggtgtgggggcgtgcgcctgtagtcccagctacttgggaggctgaggcaggagaattgcttgaacccaggaggcagaggttgcagtaagccaagatcgtgccactgcactccagccttggtgacagagcaagactccgtctccaaaaaaaagaaaaaaaaatttcttgaagtggaatgatgtacaccaaatacccactttatagataattacagggatggtgaaaaattagtaaatagcttcacaaaagaggcagcgtgatacctttagtgttttctagaatttttttctggatattatatgtaagaatttattgtttgagggaaatacgaggtttcattgtttaaaatcaagagtgtattgtttactgttttacagtattatttaatatccaactggtctccaatctccattacatagggactgtacagagcctgtgaagatgtatgaatggtatcttttataatccacaatacatttctggtaagatggaatcactacctctgatcacatatcaggctaacgatagagaaagcattaggtttaagttgagggctaagaactggtttgtttaaaggtttaaattgttggaaaagagcatttgccttctttaatgaatgatggtctcacaattcagttgactttgacctaatatttaagaatataaatatattttatttgaaaggctgagtgttgccctcaaacacttgctaaaactgcctagggcaggattcattagggcttgcagacaatgtcacctaaattgctgaatgtactcattataatatgatatctgacaaaggtagtacagcgtttctgagtcatttgggaccaactgcagtggttgtttaaaatgctggttcctgcacacaattctctatctactgaagcacatctgttttctttgtttgttttgctttgctttttgtttttaaagtttcccccagtgattccagtgcacctgaaaagttgagaaccacaggcttagtggtacgttggggtttcccacgctaggctgcatagcattataacctgggaacgttaaaaaaaatacagacattcttgattcttagtgtagttatgatgtggatcctacgtattttttaaaaaactctccagataattttgatgtcacgagtcactagtatagactatctatctagtgagttgtattataagcgatgaaatactttaaaagctacccagtaactcttgggattaattttatgaaataaattctgagctgctgcttttgatatagtcagacttaagactgaaccccagtagacaggcaatagatatagaattctggttagctaattgaacttttgtgacctgtttaaaaacaaatcaaatttattgaacaaatgacaaggcacaaatactttcagaattgtatttcagttttgaagatttaaaaaaaatgtgaaaataaatatatattagtatcctttattttaaagtcaattgtaaaccagaagtactgttattttggtgattaaaatccaaaactttagctgtatttcagtaacaaaaacataccttactagactgtgatggctcacacctgtaatcccagtgctttgggaggctgaggtgggaagattctttgagcccaggagttcaaggctgcagtgaattctgatcgcaccactgaactccagcccgtatgacagagtgagaccctgtttctaaaaacaaaacaaacaaacaaacaaacaacgtatcttactgactaaactggaatggaaatcttataattagtgttgtatttttctgcaaaatagtgaattggtacttgggagacttctgttctttgttgaaaaaaattgcctttgttttgaaattatatcacctgtgttctgaactaaaatgatgggagttcattttgtatttactttgcagtaagtatcatgtaaatatgcaaatgttgaatgtaatatagattgtgtcctcattgagtttttgggtgatacagtttataaatataacaattatacaccctcatacattcgtctgattttgagcttgtaagatgagaactgctttttacacatttaataaaaaaaggtctctgaattaaaaaaaaaaaaaaaaaaa

SEQ ID NO: 56 - DNA, 1416 bp, Homo sapiens
ggagggagggtgagttagggggagacccggcccccaaggggcgggcgccgggcagggccccgcgggcggccgagggttgggcccggctcccagcccctcgccgtcctccggctgacagggggaggagcccgccgggagggccggggtctcgggctggggagccgggacgggagagcagcgcagccgggtgcaccgcggccgcgccccgggagggctgttcgggccagcgcccgccggctgctccgcgctgacagcgccgggctggggcggggcggggggctttgcaggccgccagtgtcgacatgctgctggaggaggttcgcgccggcgaccggctgagtggggcggcggcccggggcgacgtgcaggaggtgcgccgccttctgcaccgcgagctggtgcatcccgacgccctcaaccgcttcggcaagacggcgctgcaggtcatgatgtttggcagcaccgccatcgccctggagctgctgaagcaaggtgccagccccaatgtccaggacacctccggtaccagtccagtccatgacgcagcccgcactggattcctggacaccctgaaggtcctagtggagcacggggctgatgtcaacgtgcctgatggcaccggggcacttccaatccatctggcagttcaagagggtcacactgctgtggtcagctttctggcagctgaatctgatctccatcgcagggacgccaggggtctcacacccttggagctggcactgcagagaggggctcaggacctcgtggacatcctgcagggccacatggtggccccgctgtgatctggggtcaccctctccagcaagagaaccccgtggggttatgtatcagaagagaggggaagaaacactttctcttcttgtttctcctgcccactgctgcagtaggggaggagcacagtttgtggcttataggtgttggttttgggggtgtgagtgtttgggggacgtttctcatttgtttttctcactccttttggtgtgttggacagagaagggctcctgcaggccacagccacctaaacggttcagtttcttctgcgcctcaggctgctggggcctcagacgagacccaagggcagagcatttaagagtgaagtcatgacctccagggagcctagaagctggtggccttggccggctgtgctcagagacctgaagtgtgcacgttgcttcaggcatggggggtggggggagcgtcccaaatcaataagaaggtagaatgagttatgagttattcatattctgttggaagcttgttttccagtctcttgtacagcgttttaaaagaaatggattctatttattatgctttattggaaaaaatgttgtaataatttaatgtttttacccattaaattaagacttgtgcatgatcaaaaaaaaaaaaaaaaaa

SEQ ID NO: 57 - DNA, 692 bp, Homo sapiens
ggtcagaggccacgcccccggaagcggcggtgcagaacccagggaccatgggcgcctccaggctctataccctggtgctggtcctgcagcctcagcgagttctcctgggcatgaaaaagcgaggcttcggggccggccggtggaatggctttgggggcaaagtgcaagaaggagagaccatcgaggatggggctaggagggagctgcaggaggagagcggtctgacagtggacgccctgcacaaggtgggccagatcgtgtttgagttcgtgggcgagcctgagctcatggacgtgcatgtcttctgcacagacagcatccaggggacccccgtggagagcgacgaaatgcgcccatgctggttccagctggatcagatccccttcaaggacatgtggcccgacgacagctactggtttccactcctgcttcagaagaagaaattccacgggtacttcaagttccagggtcaggacaccatcctggactacacactccgcgaggtggacacggtctagcgggagcccagggcagcccctgggcaggagacgtggctgctgaacagccgcaaaccatcttcacctgggggcattgagtggcgcagagccgggtttcatctggaattaactggatggaagggaaaataaagctatctagcggtgaaaaaaaaaaaaaaaaaaaaaaaaaaaaaa

SEQ ID NO: 58 - DNA, 5826 bp, Homo sapiens
gaggaggagacggcatccagtacagaggggctggacttggacccctgcagcagccctgcacaggagaagcggcatataaagccgcgctgcccgggagccgctcggccacgtccaccggagcatcctgcactgcagggccggtctctcgctccagcagagcctgcgcctttctgactcggtccggaacactgaaaccagtcatcactgcatctttttggcaaaccaggagctcagctgcaggaggcaggatggtctggaggctggtcctgctggctctgtgggtgtggcccagcacgcaagctggtcaccaggacaaagacacgaccttcgaccttttcagtatcagcaacatcaaccgcaagaccattggcgccaagcagttccgcgggcccgaccccggcgtgccggcttaccgcttcgtgcgctttgactacatcccaccggtgaacgcagatgacctcagcaagatcaccaagatcatgcggcagaaggagggcttcttcctcacggcccagctcaagcaggacggcaagtccaggggcacgctgttggctctggagggccccggtctctcccagaggcagttcgagatcgtctccaacggccccgcggacacgctggatctcacctactggattgacggcacccggcatgtggtctccctggaggacgtcggcctggctgactcgcagtggaagaacgtcaccgtgcaggtggctggcgagacctacagcttgcacgtgggctgcgacctcatagacagcttcgctctggacgagcccttctacgagcacctgcaggcggaaaagagccggatgtacgtggccaaaggctctgccagagagagtcacttcaggggtttgcttcagaacgtccacctagtgtttgaaaactctgtggaagatattctaagcaagaagggttgccagcaaggccagggagctgagatcaacgccatcagtgagaacacagagacgctgcgcctgggtccgcatgtcaccaccgagtacgtgggccccagctcggagaggaggcccgaggtgtgcgaacgctcgtgcgaggagctgggaaacatggtccaggagctctcggggctccacgtcctcgtgaaccagctcagcgagaacctcaagagagtgtcgaatgataaccagtttctctgggagctcattggtggccctcctaagacaaggaacatgtcagcttgctggcaggatggccggttctttgcggaaaatgaaacgtgggtggtggacagctgcaccacgtgtacctgcaagaaatttaaaaccatttgccaccaaatcacctgcccgcctgcaacctgcgccagtccatcctttgtggaaggcgaatgctgcccttcctgcctccactcggtggacggtgaggagggctggtctccgtgggcagagtggacccagtgctccgtgacgtgtggctctgggacccagcagagaggccggtcctgtgacgtcaccagcaacacctgcttggggccctccatccagacacgggcttgcagtctgagcaagtgtgacacccgcatccggcaggacggcggctggagccactggtcaccttggtcttcatgctctgtgacctgtggagttggcaatatcacacgcatccgtctctgcaactccccagtgccccagatggggggcaagaattgcaaagggagtggccgggagaccaaagcctgccagggcgccccatgcccaatcgatggccgctggagcccctggtccccgtggtcggcctgcactgtcacctgtgccggtgggatccgggagcgcacccgggtctgcaacagccctgagcctcagtacggagggaaggcctgcgtgggggatgtgcaggagcgtcagatgtgcaacaagaggagctgccccgtggatggctgtttatccaacccctgcttcccgggagcccagtgcagcagcttccccgatgggtcctggtcatgcggctcctgccctgtgggcttcttgggcaatggcacccactgtgaggacctggacgagtgtgccctggtccccgacatctgcttctccaccagcaaggtgcctcgctgtgtcaacactcagcctggcttccactgcctgccctgcccgccccgatacagagggaaccagcccgtcggggtcggcctggaagcagccaagacggaaaagcaagtgtgtgagcccgaaaacccatgcaaggacaagacacacaactgccacaagcacgcggagtgcatctacctgggccacttcagcgaccccatgtacaagtgcgagtgccagacaggctacgcgggcgacgggctcatctgcggggaggactcggacctggacggctggcccaacctcaatctggtctgcgccaccaacgccacctaccactgcatcaaggataactgcccccatctgccaaattctgggcaggaagactttgacaaggacgggattggcgatgcctgtgatgatgacgatgacaatgacggtgtgaccgatgagaaggacaactgccagctcctcttcaatccccgccaggctgactatgacaaggatgaggttggggaccgctgtgacaactgcccttacgtgcacaaccctgcccagatcgacacagacaacaatggagagggtgacgcctgctccgtggacattgatggggacgatgtcttcaatgaacgagacaattgtccctacgtctacaacactgaccagagggacacggatggtgacggtgtgggggatcactgtgacaactgccccctggtgcacaaccctgaccagaccgacgtggacaatgaccttgttggggaccagtgtgacaacaacgaggacatagatgacgacggccaccagaacaaccaggacaactgcccctacatctccaacgccaaccaggctgaccatgacagagacggccagggcgacgcctgtgaccctgatgatgacaacgatggcgtccccgatgacagggacaactgccggcttgtgttcaacccagaccaggaggacttggacggtgatggacggggtgatatttgtaaagatgattttgacaatgacaacatcccagatattgatgatgtgtgtcctgaaaacaatgccatcagtgagacagacttcaggaacttccagatggtccccttggatcccaaagggaccacccaaattgatcccaactgggtcattcgccatcaaggcaaggagctggttcagacagccaactcggaccccggcatcgctgtaggttttgacgagtttgggtctgtggacttcagtggcacattctacgtaaacactgaccgggacgacgactatgccggcttcgtctttggttaccagtcaagcagccgcttctatgtggtgatgtggaagcaggtgacgcagacctactgggaggaccagcccacgcgggcctatggctactccggcgtgtccctcaaggtggtgaactccaccacggggacgggcgagcacctgaggaacgcgctgtggcacacggggaacacgccggggcaggtgcgaaccttatggcacgaccccaggaacattggctggaaggactacacggcctataggtggcacctgactcacaggcccaagactggctacatcagagtcttagtgcatgaaggaaaacaggtcatggcagactcaggacctatctatgaccaaacctacgctggcgggcggctgggtctatttgtcttctctcaagaaatggtctatttctcagacctcaagtacgaatgcagagatatttaaacaagatttgctgcatttccggcaatgccctgtgcatgccatggtccctagacacctcagttcattgtggtccttgtggcttctctctctagcagcacctcctgtcccttgaccttaactctgatggttcttcacctcctgccagcaaccccaaacccaagtgccttcagaggataaatatcaatggaactcagagatgaacatctaacccactagaggaaaccagtttggtgatatatgagactttatgtggagtgaaaattgggcatgccattacattgctttttcttgtttgtttaaaaagaatgacgtttacatataaaatgtaattacttattgtatttatgtgtatatggagttgaagggaatactgtgcataagccattatgataaattaagcatgaaaaatattgctgaactacttttggtgcttaaagttgtcactattcttgaattagagttgctctacaatgacacacaaatcccattaaataaattataaacaagggtcaattcaaatttgaagtaatgttttagtaaggagagattagaagacaacaggcatagcaaatgacataagctaccgattaactaatcggaacatgtaaaacagttacaaaaataaacgaactctcctcttgtcctacaatgaaagccctcatgtgcagtagagatgcagtttcatcaaagaacaaacatccttgcaaatgggtgtgacgcggttccagatgtggatttggcaaaacctcatttaagtaaaaggttagcagagcaaagtgcggtgctttagctgctgcttgtgccgctgtggcgtcggggaggctcctgcctgagcttccttccccagctttgctgcctgagaggaaccagagcagacgcacaggccggaaaaggcgcatctaacgcgtatctaggctttggtaactgcggacaagttgcttttacctgatttgatgatacatttcattaaggttccagttataaatattttgttaatatttattaagtgactatagaatgcaactccatttaccagtaacttattttaaatatgcctagtaacacatatgtagtataatttctagaaacaaacatctaataagtatataatcctgtgaaaatatgaggcttgataatattaggttgtcacgatgaagcatgctagaagctgtaacagaatacatagagaataatgaggagtttatgatggaaccttaaatatataatgttgccagcgattttagttcaatatttgttactgttatctatctgctgtatatggaattcttttaattcaaacgctgaaaagaatcagcatttagtcttgccaggcacacccaataatcagtcatgtgtaatatgcacaagtttgtttttgtttttgttttttttgttggttggtttgtttttttgctttaagttgcatgatctttctgcaggaaatagtcactcatcccactccacataaggggtttagtaagagaagtctgtctgtctgatgatggatagggggcaaatctttttcccctttctgttaatagtcatcacatttctatgccaaacaggaacaatccataactttagtcttaatgtacacattgcattttgataaaattaattttgttgtttcctttgaggttgatcgttgtgttgttgttttgctgcactttttacttttttgcgtgtggagctgtattcccgagaccaacgaagcgttgggatacttcattaaatgtagcgactgtcaacagcgtgcaggttttctgtttctgtgttgtggggtcaaccgtacaatggtgtgggagtgacgatgatgtgaatatttagaatgtaccatattttttgtaaattatttatgtttttctaaacaaatttatcgtataggttgatgaaacgtcatgtgttttgccaaagactgtaaatatttatttatgtgttcacatggtcaaaatttcaccactgaaaccctgcacttagctagaacctcatttttaaagattaacaacaggaaataaattgtaaaaaaggttttctatacatgaaaaaaaaaaaaaaaaaa

SEQ ID NO: 59 - DNA, 1485 bp, Homo sapiens
tccggggcgggggcggggcctcactctgcgatataactcgggtcgcgcggctcgcgcaggccgccaccgtcgtccgcaaagcctgagtcctgtcctttctctctccccggacagcatgagcttcaccactcgctccaccttctccaccaactaccggtccctgggctctgtccaggcgcccagctacggcgcccggccggtcagcagcgcggccagcgtctatgcaggcgctgggggctctggttcccggatctccgtgtcccgctccaccagcttcaggggcggcatggggtccgggggcctggccaccgggatagccgggggtctggcaggaatgggaggcatccagaacgagaaggagaccatgcaaagcctgaacgaccgcctggcctcttacctggacagagtgaggagcctggagaccgagaaccggaggctggagagcaaaatccgggagcacttggagaagaagggaccccaggtcagagactggagccattacttcaagatcatcgaggacctgagggctcagatcttcgcaaatactgtggacaatgcccgcatcgttctgcagattgacaatgcccgtcttgctgctgatgactttagagtcaagtatgagacagagctggccatgcgccagtctgtggagaacgacatccatgggctccgcaaggtcattgatgacaccaatatcacacgactgcagctggagacagagatcgaggctctcaaggaggagctgctcttcatgaagaagaaccacgaagaggaagtaaaaggcctacaagcccagattgccagctctgggttgaccgtggaggtagatgcccccaaatctcaggacctcgccaagatcatggcagacatccgggcccaatatgacgagctggctcggaagaaccgagaggagctagacaagtactggtctcagcagattgaggagagcaccacagtggtcaccacacagtctgctgaggttggagctgctgagacgacgctcacagagctgagacgtacagtccagtccttggagatcgacctggactccatgagaaatctgaaggccagcttggagaacagcctgagggaggtggaggcccgctacgccctacagatggagcagctcaacgggatcctgctgcaccttgagtcagagctggcacagacccgggcagagggacagcgccaggcccaggagtatgaggccctgctgaacatcaaggtcaagctggaggctgagatcgccacctaccgccgcctgctggaagatggcgaggactttaatcttggtgatgccttggacagcagcaactccatgcaaaccatccaaaagaccaccacccgccggatagtggatggcaaagtggtgtctgagaccaatgacaccaaagttctgaggcattaagccagcagaagcagggtaccctttggggagcaggaggccaataaaaagttcagagttcaaaaaaaaaaaaaaaaaaa

SEQ ID NO: 60 - DNA, 1134 bp, Homo sapiens
gacgtgtctttcaggaagaggagctggtgagaagacagcgaaatggcgcctccggcccccggcccggcctccggcggctccggggaggtagacgagctgttcgacgtaaagaacgccttctacatcggcagctaccagcagtgcataaacgaggcgcagcgggtgaagctatcaagcccagagagagacgtggagagggacgtcttcctgtatagagcgtacctggcgcagaggaagttcggtgtggtcctggatgagatcaagccctcctcggcccctgagctccaggccgtgcgcatgtttgctgactacctcgcccacgagagtcggagggacagcatcgtggccgagctggaccgagagatgagcaggagcgtggacgtgaccaacaccaccttcctgctcatggccgcctccatctatctccacgaccagaacccggatgccgccctgcgtgcgctgcaccagggggacagcctggagtgcacagccatgacagtgcagatcctgctgaagctggaccgcctggacctcgcccggaaggagctgaagagaatgcaggacctggacgaggatgccaccctcacccagctcgccactgcctgggtcagcctggccacgggtggtgagaagctgcaggatgcctactacatcttccaggagatggctgacaagtgctcgcccaccctgctgctgctcaatgggcaggcggcctgccacatggcccagggccgctgggaggccgctgagggcctgctgcaggaggcgctagacaaggatagtggctacccagagacgctggtcaacctcatcgtcctgtcccagcacctgggcaagccccctgaggtgacaaaccgatacctgtcccagctgaaggatgcccacaggtcccatcccttcatcaaggagtaccaggccaaggagaacgactttgacaggctggtgctacagtacgctcccagcgcctgaggctggcccagagctgtcaggaccatgaagccaggacagaggccaggagccagccctgcagccctccccacccggcatccacctgcatcccctctgggggcaggagcccacccccagcacccccatctgttaataaatatctcaactccagggtgttccacctga

SEQ ID NO: 61 - DNA, 2240 bp, Homo sapiens
acttccgctcggggcggcggcggtggcggaagtgggagcgggcctggagtcttggccataaagcctgaggcggcggcagcggcggagttggcggcttggagagctcgggagagttccctggaaccagaacttggaccttctcgcttctgtcctccgtttagtctcctcctcggcgggagccctcgcgacgcgcccggcccggagcccccagcgcagcggccgcgtttgaaggatgacctctaggaagaaagtgttgctgaaggttatcatcctgggagattctggagtcgggaagacatcactcatgaaccagtatgtgaataagaaattcagcaatcagtacaaagccacaataggagctgactttctgaccaaggaggtgatggtggatgacaggctagtcacaatgcagatatgggacacagcaggacaggaacggttccagtctctcggtgtggccttctacagaggtgcagactgctgcgttctggtatttgatgtgactgcccccaacacattcaaaaccctagatagctggagagatgagtttctcatccaggccagtccccgagatcctgaaaacttcccatttgttgtgttgggaaacaagattgacctcgaaaacagacaagtggccacaaagcgggcacaggcctggtgctacagcaaaaacaacattccctactttgagaccagtgccaaggaggccatcaacgtggagcaggcgttccagacgattgcacggaatgcacttaagcaggaaacggaggtggagctgtacaacgaatttcctgaacctatcaaactggacaagaatgaccgggccaaggcctcggcagaaagctgcagttgctgagggggcagtgagagttgagcacagagtccttcacaaaccaagaacacacgtaggccttcaacacaattcccctctcctcttccaaacaaaacatacattgatctctcacatccagctgccaaaagaaaaccccatcaaacacagttacaccccacatatctctcacacacacacacacacgcacacacacacacacagatctgacgtaatcaaactccagcccttgcccgtgatggctccttggggtctgcctgcccacccacatgagcccgcgagtatggcagcaggacaagccagcggtggaagtcattctgatatggagttggcattggaagcttattctttttgttcactggagagagagagaactgtttacagttaatctgtgtctaattatctgattttttttattggtcttgtggtctttttaccccccctttcccctccctccttgaaggctaccccttgggaaggctggtgccccatgccccattacaggctcacacccagtctgatcaggctgagttttgtatgtatctatctgttaatgcttgttacttttaactaatcagatctttttacagtatccatttattatgtaatgcttcttagaaaagaatcttatagtacatgttaatatatgcaaccaattaaaatgtataaattagtgtaagaaattcttggattatgtgtttaagtcctgtaatgcaggcctgtaaggtggagggttgaaccctgtttggattgcagagtgttactcagaattgggaaatccagctagcggcagtattctgtacagtagacacaagaattatgtacgccttttatcaaagacttaagagccaaaaagcttttcatctctccagggggaaaactgtctagttcccttctgtgtctaaattttccaaaacgttgatttgcataatacagtggtatgtgcaatggataaattgccgttatttcaaaaattaaaattctcattttctttcttttttttcccccctgctccacacttcaaaactcccgttagatcagcattctactacaagagtgaaaggaaaaccctaacagatctgtcctagtgattttacctttgttctagaaggcgctcctttcagggttgtggtattcttaggttagcggagctttttcctcttttccccacccatctccccaatattgcccattattaattaacctctttctttggttggaaccctggcagttctgctcccttcctaggatctgcccctgcattgtagcttgcttaacggagcacttctcctttttccaaaggtctacattctagggtgtgggctgagttcttctgtaaagagatgaacgcaatgccaataaaattgaacaagaacaatgataaaaaaaa

SEQ ID NO: 62 - DNA, 1419 bp, Homo sapiens
atgagggataatgaaaaggcctggtggcagcaatggacctcccatacaggcctcgaggggtggggcgggactcaggaggaccgtatggggtttggaggggcagtagctgcactgaggggccgcccctctcccctgcagagtaccattcacgagtcctacggtcggccagaggagcaagtgctcatcaaccgccaggaaatcacgaacaaagcggacgcctgggacatgcaggagttcatcactcacatgtacatcaagcagctgctccgacaccccgccttccaactgctgctggccctgctgctggtgatcaatgccatcaccatcgctctccgtaccaactcctacctggaccagaaacactatgagttgttctctaccatagatgacattgtgctgaccatccttctttgtgaggttctccttggctggctcaatggcttctggattttctggaaggacggctggaacatcctcaacttcattatcgtctttatcttgctcttgcggttcttcattaatgaaatcaatattccctccatcaactacactctcagggcgcttcgtctggtgcatgtgtgcatggcggtggagcccctcgcccggatcatccgcgtcatcctgcagtcggtgcctgacatggccaatatcatggtcctcatcctcttcttcatgctggttttttccgtgtttggagtaacactctttggtgcattcgtgcccaagcatttccagaacatacaggttgcgctgtacaccctcttcatctgcatcacccaggacggctgggtggacatctacagtgacttccagacagagaagagggaatatgcaatggagattgggggtgccatctactttaccatcttcatcaccatcggtgccttcattggcatcaacctgttcgtcatcgtggtgaccaccaacctggagcaaatgatgaaggcaggagagcagggacaacagcaacgaataacctttagtgagacaggcgcagaggaagaggaggagaatgaccagctgccactggtgcattgtgtggtcgcccgctcggagaaatctggtctcctccaggaaccccttgcgggaggccccctgtcgaacctctcagaaaacacgtgtgacaacttttgcttggtgcttgaggcaatacaggagaacctgaggcagtacaaggagatccgagatgaactcaacatgattgtggaggaggtgcgcgcaatccgcttcaaccaggagcaggagtcagaggtgttgaacaggcgctcgtcgacgagcgggtcgttggagactacgtcatccaaggacatccgccagatgtctcaacagcaagacttgctcagtgcgctcgttagcatggaaaaggttcatgactctagctcacaaatactccttaaaaaacacaagagcagccactga

SEQ ID NO: 63 - DNA, 6372 bp, Homo sapiens
atggagaaacaactgaaccttgaggactctcagcagataaaccagatgaagtggataaagactcgctgtgtggagaaggcagggcagcccacgcagaaagggagaggggcctcgcgccgccctcagcagccggcggcggccgaggtagaccgagcggggacggaaggacagaccgacgtcgccgagctggaatcatgtgagggccaaccggggaaggtggagcagatgagcacacacaggagccgtctcctcaccgccgcccctctcagcatggaacagaggcggccctggccccgggccctggaggtggacagccgctctgtggtcctgctctcagtggtctgggtgctgctggcccccccagcagccggcatgcctcagttcagcaccttccactctgagaatcgtgactggaccttcaaccacttgaccgtccaccaagggacgggggccgtctatgtgggggccatcaaccgggtctataagctgacaggcaacctgaccatccaggtggctcataagacagggccagaagaggacaacaagtcttgttacccgcccctcatcgtgcagccctgcagcgaagtgctcaccctcaccaacaatgtcaacaagctgctcatcattgactactctgagaaccgcctgctggcctgtgggagcctctaccagggggtctgcaagctgctgcggctggatgacctcttcatcctggtggagccatcccacaagaaggagcactacctgtccagtgtcaacaagacgggcaccatgtacggggtgattgtgcgctctgagggtgaggatggcaagctcttcatcggcacggctgtggatgggaagcaggattacttcccgaccctgtccagccggaagctgccccgagaccctgagtcctcagccatgctcgactatgagctacacagcgattttgtctcctctctcatcaagatcccttcagacaccctggccctggtctcccactttgacatcttctacatctacggctttgctagtgggggctttgtctactttctcactgtccagcccgagacccctgagggtgtggccatcaactccgctggagacctcttctacacctcacgcatcgtgcggctctgcaaggatgaccccaagttccactcatacgtgtccctgcccttcggctgcacccgggccggggtggaataccgcctcctgcaggctgcttacctggccaagcctggggactcactggcccaggccttcaatatcaccagccaggacgatgtactctttgccatcttctccaaagggcagaagcagtatcaccacccgcccgatgactctgccctgtgtgccttccctatccgggccatcaacttgcagatcaaggagcgcctgcagtcctgctaccagggcgagggcaacctggagctcaactggctgctggggaaggacgtccagtgcaccaaggcgcctgtccccatcgatgataacttctgtggactggacatcaaccagcccctgggaggctcaactccagtggagggcctgaccctgtacaccaccagcagggaccgcatgacctctgtggcctcctacgtttacaacggctacagcgtggtttttgtggggactaagagtggcaagctgaaaaagattcgggccgacggtcccccccatggtggggtccagtacgagatggtctctgtgctcaaggacggaagccccatcctccgggacatggccttctccattgatcagcgctacctgtacgtcatgtctgagagacaggtcaccagggtccccgtggagtcatgtgagcagtatacgacttgtggggagtgcctgagctctggggaccctcactgtggctggtgtgccctgcacaacatgtgctcccgcagggacaaatgccaacaggcctgggaacctaatcgatttgctgccagcatcagccagtgtgtgagccttgcagtgcatcccagcagcatctcagtatctgagcacagccggttgggagctgctagagaacagagagcccacatggaacagagaagcacaaactctagggaacacgcagcctttagaagcagcctcttgatgaatgacagccaaggtgaggagctagctatcttccaccaacctagtgagctcctggtaaacctccagcttagcctggtagtgagtgatgctcctgatctatctgcgggtatcgcctgtgcctttgggaacctgacagaggtggaggggcaggtgtccgggagccaggtcatctgcatctcacctgggcccaaggatgtccctgtcatcccgctggatcaagactggtttgggctggagctacagctgaggtccaaggagacagggaagatatttgtcagcaccgagttcaagttttacaactgcagtgcccaccaactgtgcctgtcctgtgtcaacagcgccttccgctgccattggtgcaagtaccgcaacctctgcactcatgaccccaccacctgctccttccaggagggccggatcaatatttcagaggactgtccccagctggtgcccacagaggagatcttgattccagtcggggaggtaaagccaatcacccttaaggcgcgaaatctgccccagccgcagtccggccagcgaggctatgagtgtgtcctcaacatacaaggagccatccaccgggtccccgctctgcgcttcaacagctccagcgttcagtgtcagaacagctcgtaccagtatgatggcatggacatcagcaatctggccgtggatttcgctgtggtgtggaacggcaatttcatcattgacaaccctcaggacctgaaagtccatctctacaagtgtgcagcccagcgggagagctgcggcctctgcctcaaggccgaccggaagtttgagtgtggctggtgcagcggcgagcgcaggtgcaccctccaccagcactgtaccagcccttccagcccctggctcgactggtccagccacaatgtcaagtgctccaaccctcaaatcaccgagattttgacggtgtctggaccgccggaaggagggacgcgagtgaccatccatggcgtgaacctgggtctggacttctccgagatcgcccaccatgtgcaggtggctggggtgccctgcacgcccctcccaggggaatacatcatcgctgagcagattgtctgtgagatgggccatgccctcgtgggaaccacctccgggccagtacgcctgtgtattggcgagtgtaagccagagttcatgacgaagtcccatcagcagtacaccttcgtgaacccttctgtgctgtcactcaacccaatccgaggtcccgagtcaggaggcactatggtgaccattaccggccattaccttggggctgggagcagcgtggcagtctacctgggcaaccagacctgcgagttctacgggaggtcaatgagtgagatcgtgtgtgtctcacccccatcatccaatggccttggcccggtccctgtttctgtgagtgtcgaccgagcccatgtggatagcaacctgcagtttgagtacatagatgaccctcgggtccagcgcatcgagccagagtggagcattgccagtggccacacacccctgaccatcacaggcttcaacctggatgtcattcaggagccaaggatccgagtcaaattcaatggcaaagaatctgtcaatgtgtgtaaagttgtgaacacaaccaccctcacctgcctggcaccctctctgaccacggactaccgccctggcctggacactgtggaacgcccagatgagtttggatttgtctttaacaatgtccaatccttgctaatttacaacgacaccaagtttatctactaccccaacccgacctttgaactgcttagccctactggagtcttggatcaaaagccaggatcgcccatcattctgaagggcaaaaacctctgccctcctgcctctggaggggccaaactcaactacactgtgctcatcggagagaccccttgtgctgtcaccgtatctgagacccagcttctctgcgagcctcccaacctcaccgggcagcacaaggtcatggatctgctggcatgcccgggctctacacctgtgtgcatccatgtgcgtctgtatgtgtacaatgcacaggttcacgtgggcgggatggtgttctcgcctggctcggtgagtgtcatctcagacagcttgctgaccctgccagccatcgtcagcatcgcggccggcggcagcctcctcctcatcatcgtcatcatcgtcctcattgcctacaagcgcaagtctcgagaaaatgacctcactctcaagcggctgcaaatgcagatggacaatctggagtcccgtgtggccttggagtgcaaggaagcttttgctgagctccagacggatatcaatgagttgaccagtgacctggaccgctcaggaatcccttacctggactatcgtacctacgctatgcgagtcctgttcccgggcatcgaggaccaccccgtcctgcgggagctggaggtacaaggaaacgggcagcagcacgtggagaaggccctgaagctctttgcccagctcatcaacaacaaggtgttcctgctgaccttcatccgcaccctggagctgcagcgcagtttctccatgcgcgaccggggcaacgtggcttcgctcatcatgaccggcctgcagggccgcctggaatatgccactgatgtcctcaagcagctgctctctgacctcatcgataagaacctggagaacaagaaccaccccaagctgctactccggaggacagagtctgtggctgaaaagatgctgaccaattggttcgccttcctcctgcacaagttcctaaaggagtgcgcaggggagccactcttcatgctatactgtgccatcaagcagcagatggagaagggccccattgatgccatcacgggcgaggcccgctactccctgagcgaggacaagctcatccggcagcagatcgagtacaagaccctgatcctgaactgcgtcaaccctgacaacgagaacagtccagagatcccagtgaaggtgttaaactgtgacaccatcacacaggtcaaggagaagattcttgatgccgtgtataagaatgtgccctattcccagcggccgagggcagtggacatggacttggagtggcgccaaggccggatcgcccgggtcgtgctgcaagatgaggacatcaccaccaagattgagggtgactggaagcggctcaacacactgatgcattatcaggtgtcagacaggtcggtggtggctctggtccccaaacagacctcctcctacaacatccctgcctctgccagcatctcccggacgtccatcagcagatacgactcctccttcaggtatacgggcagccccgacagcctgcggtcccgggccccgatgatcaccccagacctggaaagtggggtcaaggtgtggcatctggtgaagaaccatgaccacggtgaccagaaggagggtgaccggggcagcaagatggtgtccgagatctacctgacccggctactggccaccaagactctcctggtcctgctgtgctcctgccaggaggcacccagtcctccagcttgttcctcggacactgtttccggactggcttgcagcctgtgccccctcattcacccatgggaagcccggacccggggcacttcctgtcttcctgtcaaagaccctgagcctacaccctgtgtggaatgtggaatgtggctgcagggcaccctgcagaagtttgtggacgacttgtttgagaccttgttcagcactgtgcaccggggcagcgctctccccctggccatcaagtacatgtttgatttcctagatgagcaggcagacaggcacagcatccatgacacagatgtgcggcacacctggaaaagcaactgcctccctctgcgcttctgggtgaacgtgattaagaacccccagttcgtgtttgacatccacaagggcagcatcacggacgcctgcctctctgtggtggcccagaccttcatggactcttgttcaacgtcagagcaccggctgggcaaggactccccctccaacaagctgctctatgccaaggacatccccagctacaagagctgggtggagagatactacgcagacatcgccaagctcccagccatcagtgaccaggacatgaatgcctacctcgccgagcagtcccgcctgcacgccgtggagttcaacatgctgagtgccctcaatgagatctactcctatgtcagcaagtatagtgaggagctcatcggggccctagagcaggatgagcaggcacggcggcagcggctggcttataaggtggagcagctcattaatgccatgtccattgagagctga

SEQ ID NO: 64 - DNA, 3281 bp, Homo sapiens
gagctctgcgctctgcacggaaccgaccccgtacccatggctctgataatggaaccggtgagcaaatggtctccgagtcaagtagtggactggatgaaaggtcttgatgactgtttgcagcagtatattaagaactttgagagggagaagatcagtggggaccagctgctgcgcattacacatcaggagctagaagatctgggggtcagccgcattggccatcaggaactgatcttggaagcagttgaccttctgtgtgcattgaattatggcttggaaacagaaaatctaaaaaccctttctcacaagttgaatgcatctgccaaaaatctgcagaattttataacaggaaggagaaggagtggccattatgatgggaggaccagccgaaaattgccaaacgactttctgacctcagttgtggatctgattggagcagccaagagtctgcttgcctggttggacaggtcaccatttgctgctgtgacagactattcagttacaagaaataatgtcatacaactctgcctggagttaacaacaattgtgcaacaggattgtactgtatatgaaacagagaataaaattcttcacgtgtgtaaaactctttctggagtctgtgaccacatcatatccctgtcgtcagatcctctggtttcacagtctgctcacctggaagtgattcaactggcaaacattaaaccaagcgaagggctgggtatgtatattaaatctacatatgatggcctccatgtaattactggaaccacagaaaattcacctgcagatcggtgcaagaaaatccatgctggcgatgaagtgattcaagttaatcatcagactgtggtggggtggcagttgaaaaatttggtgaatgcactacgagaggacccgagtggtgttatcttaactttgaaaaagcgacctcagagcatgcttacctcagcaccagctttactgaaaaatatgagatggaagccccttgctctgcagcctcttatacctagaagtcccacaagcagcgttgccacgccttccagcaccatcagtacacccaccaaaagagacagttctgccctccaggatctctacattccccctcctcctgcagaaccatatattcccagggatgaaaaaggaaaccttccttgtgaagacctcagaggacatatggtgggcaagccagtgcataagggatctgaatcaccaaattcatttctggatcaggaatatcgaaagagatttaatattgtcgaagaagatactgtcttatattgctatgaatatgaaaaaggaagatcaagtagtcaaggaagacgagaaagcaccccaacttatggcaagctacgacctatatctatgccagtggaatataattgggtgggggactatgaagatccaaataagatgaagagagatagtagaagagaaaactctctacttcggtatatgagcaatgaaaagattgctcaagaagaatacatgtttcagagaaacagcaaaaaggacacagggaagaagtcaaaaaagaagggtgataagagtaatagcccaactcactattcattgctacctagtttacaaatggatgcactgagacaagacatcatgggcactcctgtgccagagaccacactataccatacatttcagcagtcctcactgcagcacaaatcaaagaagaaaaacaaaggtcctatagcaggcaagagcaaaagacgaatttcttgcaaagatcttggccgtggtgactgtgagggctggctttggaaaaagaaagatgcgaagagttacttttcacagaaatggaaaaaatattggtttgtcctaaaggatgcatccctttattggtatattaatgaggaggatgaaaaagcagaaggattcattagcctgcctgaatttaaaattgatagagccagtgaatgccgcaaaaaatatgcattcaaagcctgtcatcctaaaatcaaaagcttttattttgctgctgaacatcttgatgatatgaacaggtggcttaacagaattaatatgctgactgcaggatatgcagaaagagagaggattaagcaggaacaagattactggagtgagagtgacaaggaagaagcagatactccatcaacaccaaaacaagatagccctccacccccatatgatacatacccacgacctccctcgatgagttgcgccagtccttatgtggaagcaaaacatagccgactttcctccacggagacttctcagtctcagtcttctcatgaggagtttcgccaggaagtaactgggagcagtgcagtgtctcccattcgcaagacagccagtcagcgccgctcctggcaggatttaattgagacgccactgacaagttcaggcttacactatcttcagactctgcccctggaggattctgtcttctctgactccgcggccatctccccagagcacaggcggcagtctaccctgccaactcagaaatgccacctgcaggatcactatgggccataccccttagctgagagtgagaggatgcaagtgctaaatggaaatgggggcaagcctcgaagttttactctgcctcgagatagcgggttcaaccattgctgtctgaatgctccagttagtgcctgtgacccacaggatgacgtgcaacccccagaggtggaggaagaggaggaggaggaggaggaggaaggggaggcagcaggggaaaacataggagaaaaaagtgaaagcagagaagaaaagttaggagactcattgcaagatttatacagggcactggagcaggccagtctgtcaccactaggagaacatcgtatttcaaccaagatggaatacaagctatcatttataaaaagatgtaatgatcctgtaatgaatgaaaaactacaccggctgagaattctcaaaagcactttaaaggccagagaaggggaagtagccattatcgataaagtcctagacaatccagacttgacatctaaagaattccaacaatggaagcagatgtacctcgaccttttcttggatatctgtcaaaataccacctcaaatgacccactgagtatttcttctgaagtagatgtaatcacttcctctctagcacacactcattcatacattgaaacgcatgtctaaatgtattctgccttcagaccatctagtacctgctggtactctgaacaagtatataaggtagtttttatatcaatgtgtggaacacttgacaagctatactttaatgttacccaactatatgaaacaaaccatatatggtc

SEQ ID NO: 65 - DNA, 4001 bp, Homo sapiens
atgtcaatggttgatactgaagaatggattgctaccattgaagcattgctttcaaaaagttttgatgcttgtcagtggttagttgaatattttattagttctgaaggacgagaattgataaagattttcttactggagtgcaatgtgagagaagtacgagttgctgtggccaccattctggagaaaaccctagacagtgccttgttttatcaggataagttaaaaagccttcatcagttactggaggtactacttgctctgttggacaaagacgtcccagaaaattgtaaaaactgtgctcagtactttttcctgttcaacacttttgtacaaaagcaaggaattagggctggagatcttcttctgaggcattcagctctgcggcacatgatcagcttcctcctaggggccagtcggcaaaacaatcagatacgtcgatggagttcagcacaagcacgagaatttgggaatcttcacaatacagtggcgttacttgttttgcattcagatgtctcatcccaaaggaatgttgctcctggcatatttaagcaacgaccacccattagcattgctccctcaagccctctgttgcccctccatgaggaggtagaagccttgttgttcatgtctgaagggaaaccttacctgttagaggtaatgtttgctttgcgggagctgacaggctcgctcttggcactcattgagatggtagtgtactgctgtttctgtaatgagcatttttccttcacaatgctgcatttcattaagaaccaactagaaacggctccacctcatgagttaaagaatacgttccaactacttcatgaaatattggttattgaagatcctatacaagtagagcgagtcaaatttgtgtttgagacagaaaatggattactagctttgatgcaccacagtaatcatgtggacagtagtcgctgctaccagtgtgtcaaatttcttgtcactcttgctcaaaagtgtcctgcagctaaggagtacttcaaggagaattcccaccactggagctgggctgtgcagtggctacagaagaagatgtcagaacattactggacaccacagagtaatgtctctaatgaaacatcaactggaaaaacctttcagcgaaccatttcagctcaggacacgttagcgtatgccacagctttgttgaatgaaaaagagcaatcaggaagcagtaatgggtcggagagtagtcctgccaatgagaacggagacaggcatctacagcagggttcagaatctcccatgatgattggtgagttgagaagtgaccttgatgatgttgatccctagaggaacatgcccagcctgagaggagtcaagacacaatactggatgctcagcaccttcttggaatcagaatctcgaaccctttggaagagcctggagattggactgggaaagctgctgtgacttgggcggatcgtgtatttctcaaggaaagcatttttaagccactagaaggtttgggagctgtttggcagtgggagaactccggcatgtggatcagctgtcccgggagcgtggtctatatgtggattcacatttctgtggagattttcggaaatagagccagtggcagacttttttgttacacgaacatacaagagtgagcataaagctgttgctttctctacgatgctacaaaagaaattcctttggtttttatattttaagaaaaagcaagctgcttttagatatgtgggggcaaatttttaatcttgcagtaatattaaacaggaatatccaatttaaaatgatgtaaagatgtaataaaattccttttcattgtaaaatagtaattaagtcaatttacacagacctttgtatttaatatgtctccctatttgtatagaatttcagatgggtctagatgagaaccctatgcataagcttggatcttgatgaaaggttaccaggatcaggatcaaaaattgggaaatactaagctcttgaagatatttttctgatataattagattgaaaagagcaattttgaaaatgctgtgttctccagaagtacagggtgcattatttgacatcaattacttaaagaagttatgagttgttccccaaacagattttaaaaacagcaaaataaaagcactttaagatataattttactgagtttaacttcacagaattatctttttaatgcttggagacatattgaataaactgtagtcttaaatcatgtgatctgcaatcgtttgcttttgcttaaaacataattactgaaacccttggtattggttgtatatgaagttaactatttgagttggtacacactgcttgtgagtttcatagttattgtaatgcagagaaggaatttgagaatttgtttctcctcaacatgactaattaacactgaaaagtcagtcaaggtttaagatttattttcccagaaataaatataaagcaattgaataaccatccatttagtcgtatttccaaagtatagcaccattcactcatttataccagctcccttttatggtgtgggggagaggtttacacccacatatttcatatatattttgtacattttgtattttgaattgctcacattttcggccctgttttgcctttagttacaggtcctgccttattttcatctcaccatgcacagaactagggagccttaggaagtgccaggttttcactgtcagatttgccaagtcacagaggcgcagccagccctgaagtgcctgtctggctgctgtggcattgtgtgggcatgtggccaggcagatggcatctcattactgtgctctcgccatggcccagtcttttcattctctggcagtgagggtttctgtgctgtcagacttcattgttattctgtgacttgctggaggttggcagtggcctttgtcaaacacactgagaagatggaagggccagcacttaagagcagaactgtacccttagagaaacggacagaggcgagtggcaaacttcagacggttccaatggtcttgcagtttgaaatgtgatgttctaccattggttttgagtacgtgaatacttcctgtcctactgtttcccctaccctattctcaccttctctccgcccacatcctcaccaagagattgtgtgggacatgaccttgaaatgctggcgatgatccacactgggatatcatcgctggcgactgcactctcaggagcccaaaatcaggagtgaaattgccacttctagtccccttatttcctatggaaacaacgccttccgcacccctagcacctgccgtcctcactgtaaagcttcatcaggatcgtccaccgtgtatattatacgcttcagatcatgttgcttatattgttgctgcaatgaccatcgttttcactttgctggtaaccacttgattgctgacagctacagtcaatgaacctgctgatgactttttttaatgtagtacaacagtgacagttatgacaggcttaccttggaagagttgtcatttttactgccaattttttggatgaagatgtttttataaacctttcaaaatggtctgcaaacagagcaggaattgcacaattaactcaataatgctgtgtgttctcaagaagctcccttagtgaggccgatcttaagatggccgattctgcccgttgaaggcatcctgggaaagaaaacaagcatcccagcgggcatctcaccacgacttctcctggagtcctcacacggtcactgacaactacagtcagttttaggaactagagtgccgtatcatcagacttaccctgtcctgccccaccttccctgctaacatcgaggtgtgtgcagttaccttctgagcttggaacaagcagactggaattttcctctgctacctcttgtgtataaaatcttgtttataaaatttcaaaaggaagtagatacactagggaagaaccttaattctaaatttggttcatgtgtggcaaagttcttagcttctaagagtataaaataaatttttcaaaaaca

SEQ ID NO: 66 - DNA, 5613 bp, Homo sapiens
ggacgcgggacccgtacagcggcctccgccgcaccgggacagcagccgccgccgctgccgccgtcctcccctgtctacccggagctgtctcgagctgagccccctaccgggccggatcccgagataaagcctagccatggctgctgtttattctggcatttcccttaagcttaaaagcaagacaacttcctgggaagataaactaaaactagctcactttgcttggatttctcaccagtgctttcttccaaataaagaacaagtgttacttgattgggcaagacaatcattggttgcattttataagaaaaagcttgaactgaaggaagatattgttgaaaggctttggatctatatagataacattttacatagcagaaaattgcagaatctcctcaagaatggaaagaccattaatcttcagatttccctagtcaagatcatcaatgagagagtagctgagttctctctttcgggatcccaaagaaacatctgtgctgtccttcgatgttgccagggcatcctgtcgacacctgccctggctgtcatctacacggccaaacaggagctgatggtggccttgctgagccagctttgctggtcggcctgcaggcagcccgaaggagctgtggtagcccagttgtttgaggtcattcacctggcccttggccattatctcttgatcctgcagcagcaggtcaacccaagacgtgcctttggggatgtgactgctcacctgctccagccgtgcctggtcctgaggcacttactctctgggggcacatggacgcaggctggccagggccagctgaggcaggtgctgagccgggacatcaggagtcagattgaggccatgttccgaggagggatttttcagcctgagctactgtcatcctacaaggaggggctcttggaccagcagcaaggggatgtgaagacgggagccatgaagaaccttctggctcccatggacaccgtgcttaacaggctggttgatgctggctactgtgcagcatcccttcatacctctgttgtggccaactcagtggccttgctgtataagctctttctagattcttactttaaggagggaaaccagcttctctgcttccaggttctccccaggttgtttggctgcttgaagatttcacacctgcaggaggagcagagcaaagccctgtccacatcagattggaccacagagcttttggttgtggaacagctactaaactcagtggccaacaacaatatctacaacatcgctgccgacagaattcggcacgaagaggctcagttccgcttttaccgccacgtggctgagctgctgataaaccatgcacaagcacccataccggcctggttccgctgtctgaagactttgatatctctgaatcatttgattttggagccagacctggatgacctgctggcttcagcgtggatcgatgccgaggtaacagagtttcgaaccaaaaaagcccaggaggcgcttattcgtactgtcttccagacttatgccaaactccgacaagtgccacggttgtttgaagaggttttgggggtgatctgtcgtccagctgctgaggcactgaggcagcctgtgctggcctcgggcccctccacggtactctctgcatgcctcctggagctgcctccaagtcagatcctggacacgtggtcccttgtgctggagaagttccagtctttagtcttgccctatttgcagagtgatgccgacatggccctgaaatcactgtcactgagcttgctgctgcactgcatcatgttcaacatgaggagcctggacagcagcacgcctctgcccattgtcagacggacacagtgcatgatggagaggatgatgagggagctcgtgcagcccctgctggcccttctcccggacaccccaggcccagagccagagctgtggctgcagaaggtcagtgactctgtgctcctgctctcttacacttgggcccaggtggacgctatgttcagtttgaactgtagccagtatcactctatgtctgggccccttataggtgttgctctggagatctcgaacctcccttcgttgctcccaggtgtaaaaacacagcattggaagaagatagagaagtttacagctcagttcagctctcttggtacatattgcttagaacagctgtacctgcagaaaatgaaaaggactttaatgcaaactagtttccggtctgaaggagccatccaaagtttgaggtgcgatgctgcctttattattggttccggcagaaaaagcttgaatcagagaacgacggcttcctgggatggccaagttgggatggtgagtggactcacataccctgtagcacactggcacttgattgtgtcaaatctcacaattttaatatcctatctgtgtccagatgatgtgggatacctggccagtgtcctgctgagaactttacccatgggcaaagcccaggaagtctcaatagatgaagaggcatacatcacactggaaaaaatatccaaagccttccttcatagccctctctttccagagatgcagtcccttcattctgctttcttaacgtgcgtaaccacaagttgctccagcattctgtgttctggtgcccagcgtgactcaggtcttgtcagtcagcagcttccctggctttttgaaaaggaccacatggttgtgggtcattgggaaaacagatttgcaaaagctggacccgaaggtatagaacctagaggagaaattgcccagaacttactgtccctggtcaagagtgacttccctatccagctggagggagagcagttggaaagcatcctggggcttttggaagtgatttctgccttacagctggacagcctcttgccaccctatcatgtgcattattttcttgtgttactgtccatggccgtcaccaaactaggatgctcttgctcctcctcactggctctcaagttcttgacgacttgctaccaacttcttggttacttgcaaaaggggaaaagtgctcgctctgtgttcaagatcatgtatggtagtgatatttttgaggttgtactgacctcattgttcagagctagtagtaggttccttattgagatggatgatcccgcttggctggaattcctccaagtgatagggacgttcttagaggagctaatgcagatgctcatccaaatgaagctgagcttggtgctcaattttagaaaaatcaccgcattcctctctagttccaaaccatacacggaggcagcttcaagcaaacaattagaaaatcagaacccccagggcaggcagctccttctggtgtctttaaccaggttgtgccatgtcctgggacctttcctcaaagagcagaagctgggccaagaggccccagcagcactgtctgagctgctgcagcaggttgtgctgcagacaggagctgtgctgcagctctgctcagtgccgggggcccggggctggcgccttccctcggtcctcatctcatccgtcagcacgctcttggaagccgacctgggtcagcactgcagggatggaggggccgacatttcccaaggaagcgacaggacgctgctctcccatgttgccctctaccagggtgtttactctcagatactgttggagttgccagctctcgcgggacatgatcagtcttttcaggcagccttgcagtttttgactctgttctttttggccccagaactgcatcccaaaaaggactccgtgtttacctccatgtttcattctgtgagaagagttcttgcagatcctgaaattcctgttcaggtcactcaggatattgagcctcatttgggagccttgttcacccaaatgttagaggttgggacgacagaggacttgaggctggtgatgcagtgtattctccagggactggatgtcagtaacatgtggaaagcagatgtgcaggctgttgtgtcagctgttacactgctgaggctgctactgaactgcccactcagtggagagaaagcaagtctgttgtggcgtgcgtgtccccagatagtcacagctttaacactcttaaaccgagaagcttctcaggagcagcctgtgtccctcacagtggtcgggcctgtcttagatgtcctggctgcactgctgcggcagggggaggaggccatcggcaacccccaccacgtcagcctggccttcagcatccttctcactgtccctttggaccatctgaagccgctggagtatggaagcgtcttcccgaggctgcacaacgtgctcttctcaatcctgcagtgtcaccctaaggtaatgctgaaagccatcccttctttcttgaactctttcaatagattggtgttttcagttatgcgggaagggcggcagaaggacaaaggaagcatagatgacctgcctacggtcctaaagtgtgcacgcctggttgaaagaatgtacagccacatcgccgcacgagctgaggagtttgctgtgttttccccatttatggtggcccagtacgtgttggaggtacagaaggtgaccttatatccagctgtgaaaagtctgctgcaggagggcatttacctcatcctggacctctgcatcgagcctgacgtccagttcctgcgggcctcgctgcagccgggaatgagagacatctttaaggagctctataatgactatctcaagtaccacaaggccaaacatgaaggagagaaaagatatacggcctaaggctatgggacagaagtgccgccagtgacactgtccagaggctttggctgcatggtctgaaagagctggagaatgaaagacttaagatgttctaattcgtagtattggtatacatagaaaatcctttggggtttatgtagtatattttgatgtattttacatcgtgtttttcttactattttttaatacatagttttatgcagtaagtattgcaatagaatcctgaaaattgaccctgggatgagattaattcaatagaaaaattgctgactcttgggacctttctgtgtttggttctcgtcttggctcagtggtttggtgttccctcgtctgcactggaaactacataaaacttggctttttactttgggtacatgggcgtataattcagccctgtttaaatatacttgcctttcaaattcttcaagtaacatgggaagtattcttgaaatgtcacattttctgccttccctctaagtatgctttctgaagaagtcagggaaagttagagtctgtggcctgaggtgtctgctctgggtggcgatagtgggcacctcaggcaggtcggtgacgtttagcacaggtgccagggctcctgcctgctcctcctgtgttagctctgtgaagttcatttaggaatttttttttcctatgcagtttaagaaataatcctaattgttttttcttattacctaagcaatatatttttattatagcaacctcagaaaagaaaaataaaaggataatttaaaaaactcattcatagtctcagttacccagataacctcggttgtcaccttggagtatcttgttgtagtccctttactatgtgtatgtatatagatgtgcatataaatatatatagtagctaaattggatcataaatgcatttttttaaagtt

SEQ ID NO: 67 - DNA, 3279 bp, Homo sapiens
gacgtcgcgcgggctcccgggcggggcgggtccggccgcctccgagcccggccggcagcccccggccttaaagcgcgggctgtccggaggggtcggctttcccaccgaggatttggcactctggtgagggaaaagggcgaaagagaaaagcgagcagccgtcctttcacagcctcagaaagtgctcgcttcccttcgggggctttcgcgaatcccgaggcaatctcggaggcggtatttgacctgtccaaagacgacttgatacctctataatgtaacagaaaaggtcagaaaatattaagcaagtagaagtgtggagcatattaagcaagatgaacatctcgggaagcagctgtggaagccctaactctgcagatacatctagtgactttaaggacctttggacaaaactaaaagaatgtcatgatagagaagtacaaggtttacaagtaaaagtaaccaagctaaaacaggaacgaatcttagatgcacaaagactagaagaattcttcaccaaaaatcaacagctgagggaacagcagaaagtccttcatgaaaccattaaagttttagaagatcggttaagagcaggcttatgtgatcgctgtgcagtaactgaagaacatatgcggaaaaaacagcaagagtttgaaaatatccggcagcagaatcttaaacttattacagaacttatgaatgaaaggaatactctacaggaagaaaataaaaagctttctgaacaactccagcagaaaattgagaatgatcaacagcatcaagcagctgagcttgaatgtgaggaagacgttattccagattcaccgataacagccttctcattttctggcgttaaccggctacgaagaaaggagaacccccatgtccgatacatagaacaaacacatactaaattggagcactctgtgtgtgcaaatgaaatgagaaaagtttccaagtcttcaactcatccacaacataatcctaatgaaaatgaaattctagtagctgacacttatgaccaaagtcaatctccaatggccaaagcacatggaacaagcagctatacccctgataagtcatcttttaatttagctacagttgttgctgaaacacttggacttggtgttcaagaagaatctgaaactcaaggtcccatgagcccccttggtgatgagctctaccactgtctggaaggaaatcacaagaaacagccttttgaggaatctacaagaaatactgaagatagtttaagattttcagattctacttcaaagactcctcctcaagaagaattacctactcgagtgtcatctcctgtatttggagctacctctagtatcaaaagtggtttagatttgaatacaagtttgtccccttctcttttacagcctgggaaaaaaaaacatctgaaaacactcccttttagcaacacttgtatatctagattagaaaaaactagatcaaaatctgaagatagtgcccttttcacacatcacagtcttgggtctgaagtgaacaagatcattatccagtcatctaataaacagatacttataaataaaaatataagtgaatccctaggtgaacagaataggactgagtacggtaaagattctaacactgataaacatttggagcccctgaaatcattgggaggccgaacatccaaaaggaagaaaactgaggaagaaagtgaacatgaagtaagctgcccccaagcttcttttgataaagaaaatgctttcccttttccaatggataatcagttttccatgaatggagactgtgtgatggataaacctctggatctgtctgatcgattttcagctattcagcgtcaagagaaaagccaaggaagtgagacttctaaaaacaaatttaggcaagtgactctttatgaggctttgaagaccattccaaagggcttttcctcaagccgtaaggcctcagatggcaactgcacgttgcccaaagattccccaggggagccctgttcacaggaatgcatcatccttcagcccttgaataaatgctctccagacaataaaccatcattacaaataaaagaagaaaatgctgtctttaaaattcctctacgtccacgtgaaagtttggagactgagaatgttttagatgacataaagagtgctggttctcatgagccaataaaaatacaaaccaggtcagaccatggaggatgtgaacttgcatcagttcttcagttaaatccatgtagaactggtaaaataaagtctctacaaaacaaccaagatgtatcctttgaaaatatccagtggagtatagatccgggagcagacctttctcagtataaaatggatgttactgtaatagatacaaaggatggcagtcagtcaaaattaggaggagagacagtggacatggactgtacattggttagtgaaaccgttctcttaaaaatgaagaagcaagagcagaagggagaaaaaagttcaaatgaagaaagaaaaatgaatgatagcttggaagatatgtttgatcggacaacacatgaagagtatgaatcctgtttggcagacagtttctcccaagcagcagatgaagaggaggaattgtctactgccacaaagaaactacacactcatggtgataaacaagacaaagtcaagcagaaagcgtttgtggagccgtattttaaaggtgatgaaagagagactagcttgcaaaattttcctcatattgaggtggttcggaaaaaagaggagagaagaaaactgcttgggcacacgtgtaaggaatgtgaaatttattatgcagatatgccagcagaagaaagagaaaagaaattggcttcctgctcaagacaccgattccgctacattccacccaacacaccagagaatttttgggaagttggttttccttccactcagacttgtatggaaagaggttatattaaggaagatcttgatccttgtcctcgtccaaaaagacgtcagccttacaacgcaatattttctccaaaaggcaaggagcagaagacatagacgttgaaacagaaacagaaggatgaaggacagttttttccttcttagttatttatagttaaagttggtactaaacattgatttttttgatcttctgtaaatggatttataaatcagttttctattgaaaatgtttgtgatattttgcttttgcacctttaaaacaataaggcgctttcattttgcactctaacttaagagtttttactttatgtagtgatacctaatacaattttgaaaatacaaaaaaaaaa

SEQ ID NO: 68 - DNA, 3916 bp, Homo sapiens
ccggggggtttaagagaagagcctttcggaccacaccggcgctcacgctcatacccgcacgccccgggcagagccgcgcacgccggccacactcgggcgcgcgccggccacactcgcgcgcacacatacgcggcgctcgccccccggcccccggctcgggccgcgagtcgcagctccctgccgccgctcccgccgccacggatgcccgcagctgctcccctctgcagtgcagcaaccccggccgccggccggctcgccccggctcccggctgcaggaatcgcgccaggacgctggccccgctcgcggctagcttgcacgccagggcacagcgaggatgggagggtcgcagtccctgcagccagccccagccagcgacctgaacctggaggcttccgaggcaatgagttccgattctgaagaggcatttgagaccccggagtcaacgacccctgtcaaagctccgccagctccacccccaccaccccccgaagtcatcccagaacccgaggtcagcacacagccacccccggaagaaccaggatgtggttctgagacagtccctgtccctgatggcccacggagcgactcggtggaaggaagtcccttccgtcccccgtcacactccttctctgccgtcttcgatgaagacaagccgatagccagcagtgggacttacaacttggactttgacaacattgagcttgtggatacctttcagaccttggagcctcgtgcctcagacgctaagaatcaggagggcaaagtgaacacacggaggaagtccacggattccgtccccatctctaagtctacactgtcccggtcgctcagcctgcaagccagtgactttgatggtgcttcttcctcaggcaatcccgaggccgtggcccttgccccagatgcatatagcacgggttccagcagtgcttctagtacccttaagcgaactaaaaaaccgaggccgccttccttaaaaaagaaacagaccaccaagaaacccacagagacccccccagtgaaggagacgcaacaggagccagatgaagagagccttgtccccagtggggagaatctagcatctgagacgaaaacggaatctgccaagacggaaggtcctagcccagccttattggaggagacgccccttgagcccgctgtggggcccaaagctgcctgccctctggactcagagagtgcagaaggggttgtccccccggcttctggaggtggcagagtgcagaactcaccccctgtcgggaggaaaacgctgcctcttaccacggccccggaggcaggggaggtaaccccatcggatagcggggggcaagaggactctccagccaaagggctctccgtaaggctggagtttgactattctgaggacaagagtagttgggacaaccagcaggaaaacccccctcctaccaaaaagataggcaaaaagccagttgccaaaatgcccctgaggaggccaaagatgaaaaagacacccgagaaacttgacaacactcctgcctcacctcccagatcccctgctgaacccaatgacatccccattgctaaaggtacttacacctttgatattgacaagtgggatgaccccaattttaaccctttttcttccacctcaaaaatgcaggagtctcccaaactgccccaacaatcatacaactttgacccagacacctgtgatgagtccgttgacccctttaagacatcctctaagacccccagctcaccttctaaatccccagcctcctttgagatcccagccagtgctatggaagccaatggagtggacggggatgggctaaacaagcccgccaagaagaagaagacgcccctaaagactgacacatttagggtgaaaaagtcgccaaaacggtctcctctctctgatccaccttcccaggaccccaccccagctgctacaccagaaacaccaccagtgatctctgcggtggtccacgccacagatgaggaaaagctggcggtcaccaaccagaagtggacgtgcatgacagtggacctagaggctgacaaacaggactacccgcagccctcggacctgtccacctttgtaaacgagaccaaattcagttcacccactgaggagttggattacagaaactcctatgaaattgaatatatggagaaaattggctcctccttacctcaggacgacgatgccccgaagaagcaggccttgtaccttatgtttgacacttctcaggagagccctgtcaagtcatctcccgtccgcatgtcagagtccccgacgccgtgttcagggtcaagttttgaagagactgaagcccttgtgaacactgctgcgaaaaaccagcatcctgtcccacgaggactggcccctaaccaagagtcacacttgcaggtgccagagaaatcctcccagaaggagctggaggccatgggcttgggcaccccttcagaagcgattgaaattacagctcccgagggctcctttgcctctgctgacgccctcctcagcaggctagctcaccccgtctctctctgtggtgcacttgactatctggagcccgacttagcagaaaagaaccccccactattcgctcagaaactccaggaggagttagagtttgccatcatgcggatagaagccctgaagctggccaggcagattgctttggcttcccgcagccaccaggatgccaagagagaggctgctcacccaacagacgtctccatctccaaaacagccttgtactcccgcatcgggaccgctgaggtggagaaacctgcaggccttctgttccagcagcccgacctggactctgccctccagatcgccagagcagagatcataaccaaggagagagaggtctcagaatggaaagataaatatgaagaaagcaggcgggaagtgatggaaatgaggaaaatagtggccgagtatgagaagaccatcgctcagatgatagaggacgaacagagagagaagtcagtctcccaccagacggtgcagcagctggttctggagaaggagcaagccctggccgacctgaactccgtggagaagtctctggccgacctcttcagaagatatgagaagatgaaggaggtcctagaaggcttccgcaagaatgaagaggtgttgaagagatgtgcgcaggagtacctgtcccgggtgaagaaggaggagcagaggtaccaggccctgaaggtgcacgcggaggagaaactggacagggccaatgctgagattgctcaggttcgaggcaaggcccagcaggagcaagccgcccaccaggccagcctgcggaaggagcagctgcgagtggacgccctggaaaggacgctggagcagaagaataaagaaatagaagaactcaccaagatttgtgacgaactgattgccaaaatggggaaaagctaactctgaaccgaatgttttggacttaactgttgcgtgcaatatgaccgtcggcacactgctgttcctccagttccatggacaggttctgttttcactttttcgtatgcactactgtatttcctttctaaataaaattgatttgattgtatgcagtactaaggagactatcagaatttcttgctattggtttgcattttcctagtataattcatagcaagttgacctcagagttcctgtatcagggagattgtctgattctctaataaaagacacattgctgaccttggccttgccctttgtacacaagttcccagggtgagcagcttttggatttaatatgaacatgtacagcgtgcatagggactcttgccttaaggagtgtaaacttgatctgcatttgctgatttgtttttaaaaaaacaagaaatgcatgtttcaaataaaattctctattgtaaataaaattttttctttggatcttggcaaaaaaaaaaaaaaaa

SEQ ID NO: 69 - DNA, 2297 bp, Homo sapiens
cgggaagcggcgcgcgctgcgcgggaggtgacggtgcctctgactgtccgggtccctccagcattttgcagctttctcctgtcttgaagaagtagaacggtgcccgagaaacgtttttccccttcgagactcaggaggatgaaagtcatcacttgtgaaatagcctggcacaacaaggagcccgtgtacagcctggacttccagcatgggacggctgggaggatccacagactggcgtctgccggcgtggacaccaatgtcaggatctggaaggtagaaaagggaccagatggaaaagccatcgtggaatttttgtccaatcttgctcgtcataccaaagccgtcaatgttgtgcgtttttctccaactggggaaattttagcatcgggaggagatgatgctgtcatcctattgtggaaggtgaatgataacaaggagccggagcagatcgcttttcaggatgaggacgaggcccagctgaacaaggagaactggacggttgtgaagactctgcggggccacttagaagatgtgtatgatatttgctgggcaactgatgggaatttaatggcttctgcctctgtggataacacagccatcatatgggatgtcagcaaaggacaaaagatatcaatttttaatgaacataaaagttatgtccaaggagtaacctgggaccctttgggtcaatatgttgctactctgagctgtgacagggtgctgcgagtatacagtatacagaagaagcgtgtggctttcaatgtttcgaagatgctgtctggaataggggctgaaggagaggcaagaagctaccggatgtttcacgacgacagcatgaagtctttcttccgtagactgagtttcactcccgacggatctttgcttctcacgccagctggatgtgtggaatctggtgaaaatgtaatgaataccacttatgttttctccaggaagaatcttaaaaggcccatcgctcatcttccatgtcctggaaaagccactcttgctgttcgctgctgtccggtctactttgaactgaggccagtggtggaaacaggtgtggagctgatgagtctgccctaccgcctggtgtttgctgtggcctcggaggattccgtgcttctgtatgacacccagcagtccttcccttttggttacgtgtctaatatacattaccacaccctcagtgacatttcatggtccagcgatggtgccttcctggccatttcttccacggacggttactgctcatttgtgacatttgagaaagatgaacttggaattcctttgaaagagaagccagttttgaacatgagaactcctgatacagcaaagaaaaccaagagtcagacacatcgagggtcttcgccaggacccagaccggtagagggaacccctgccagcagaacccaagaccccagcagccccggcacgactccccctcaggccagacaggccccagccccaacagtcatcagggaccctccctccatcactcctgctgtcaaaagccccttgccggggccttcggaggagaagaccctgcagcccagtagtcaaaacacaaaagcccacccatcccggagggtcactctgaacacactgcaagcctggagcaagacaacaccccggagaataaacttaacacccttaaagacggacactccaccaagttctgtaccaaccagtgtgatttccaccccttctacagaagaaattcagtcagagacgcctggagacgctcagggcagtcccccagagctaaagcggcccagactcgatgaaaacaaaggaggcacggaaagtctggacccttgatgggacctcggcttctgctcgaagcctaccaggctcccggtgtgtgcagggagacggtaaagctggaggtgcctgagaccagggcttccatggagcgggacacactgtaaatggatttctataacagaagtgacatgtgtactgatttttctccagaaatatggatgctgttgtattcagtatccatttttaacttgggacatgaacgttttaacgtagtaaatcctctttttgatgagtttctgaaactggagcggttcaacgttatccagtgtgaaaatcagtgagtcctccctggcatcctcgtgaaagtgcacacacttcatggagggactccttttcaataagaattaggaagatgagaaagtaatttgagattttactctgtcgaattttagagtatttgaagtgattgttagatttcacttctaaggagttgattgattaaactttggaaggtaaaaaaaaaaaaaaaaaaa

SEQ ID NO: 70 - DNA, 1620 bp, Homo sapiens
cagcctcctcacagctccccatagcctggacctgccggccctccctccaggaccgaggggctcccaagggaaactcaggcgtgtgctggtcccaatgtcagtgaaacccagctgggggcctggcccctcggagggggtcaccgcagtgcctaccagtgaccttggagagatccacaactggaccgagctgcttgacctcttcaaccacactttgtctgagtgccacgtggagctcagccagagcaccaagcgcgtggtcctctttgccctctacctggccatgtttgtggttgggctggtggagaacctcctggtgatatgcgtcaactggcgcggctcaggccgggcagggctgatgaacctctacatcctcaacatggccatcgcggacctgggcattgtcctgtctctgcccgtgtggatgctggaggtcacgctggactacacctggctctggggcagcttctcctgccgcttcactcactacttctactttgtcaacatgtatagcagcatcttcttcctggtgtgcctcagtgtcgaccgctatgtcaccctcaccagcgcctccccctcctggcagcgttaccagcaccgagtgcggcgggccatgtgtgcaggcatctgggtcctctcggccatcatcccgctgcctgaggtggtccacatccagctggtggagggccctgagcccatgtgcctcttcatggcaccttttgaaacgtacagcacctgggccctggcggtggccctgtccaccaccatcctgggcttcctgctgcccttccctctcatcacagtcttcaatgtgctgacagcctgccggctgcggcagccaggacaacccaagagccggcgccactgcctgctgctgtgcgcctacgtggccgtctttgtcatgtgctggctgccctatcatgtgaccctgctgctgctcacactgcatgggacccacatctccctccactgccacctggtccacctgctctacttcttctatgatgtcattgactgcttctccatgctgcactgtgtcatcaaccccatcctttacaactttctcagcccacacttccggggccggctcctgaatgctgtagtccattaccttcctaaggaccagaccaaggcgggcacatgcgcctcctcttcctcctgttccacccagcattccatcatcatcaccaagggtgatagccagcctgctgcagcagccccccaccctgagccaagcctgagctttcaggcacaccatttgcttccaaatacttcccccatctctcccactcagcctcttacacccagctgaggtagaggccagactcctccaacagtgaaggaaaaggcacaggtgagagtataggtgggagatttggggggatgtagaggggagggtcaaagcactcgtggtcaattttgaatctatcttaaaatactgaggtgtggagagagagacaggatcaggagcgatagagagcaggccctcagtgttgtactatttgtctcggtccttgtgtctaaggagcaatgcagaaaaaaaggtgaaataaatggaagagatagccatggaaaaaaaaaaaaaaaaaaaaaaaaaaaaaaaaaaaaaaaaaaaaaaaaaaa

SEQ ID NO: 71 - DNA, 2733 bp, Homo sapiens
ggcagaggagcgagtgcagcggccagcagcacatccccgctccacagtcgccgcagtcgccgcagccgccgccgccgccccgcgcgcccaaccgccgcggccccctgccccgccggcctgccagtgagagagcggcgagggggcgcccggccggactctgagcctagtcctctcgcgctgcggccgcccgcgcctcctcggccgcctgtcgggcatgaaaaccaaattctgcaccgggggcgaggcggagccctcgccgctcgggctgctgctgagctgcggtagcggcagcgcggccccggcgcccggcgtggggcagcagcgcgacgccgccagcgacctcgagtccaagcagctgggcggccaacagccgccgctcgcgctgccccctccgccgccgctgccgctgccgctgccgctgccccagcccccgccgccgcagccgcccgcagacgagcagccggagccccggacgcggcgcagggcctatctgtggtgcaaggagttcctgcccggcgcctggcggggcctccgcgaggacgagttccacatcagtgtcatcagaggcggccttagcaacatgctgttccagtgctccctacctgacaccacagccacccttggtgatgagcctcggaaagtgctcctgcggctgtatggagcgattttgcagatgaggtcctgtaataaagagggatccgaacaagctcagaaagaaaatgaatttcaaggggctgaggccatggttctggagagcgttatgtttgccattctcgcagagaggtcacttgggccaaaactctatggcatctttccccaaggccgactggagcagttcatcccgagccggcgattagatactgaagaattaagtttgccagatatttctgcagaaatcgccgagaaaatggctacatttcatggtatgaaaatgccattcaataaggaaccaaaatggctttttggcacaatggaaaagtatctaaaggaagtgctgagaattaaatttactgaggaatccagaattaaaaagctccacaaattgctcagttacaatctgcccttggaactggaaaacctgagatcattgcttgaatctactccatctccagttgtattttgtcataatgactgtcaagaaggtaatatcttgttgctggaaggccgagagaattctgaaaaacagaaactgatgctcattgatttcgaatacagcagttacaattacaggggattcgacattggaaatcacttctgtgagtggatgtatgattatagctatgaaaaatacccttttttcagagcaaacatccggaagtatcccaccaagaaacaacagctccattttatttccagttacttgcctgcattccaaaatgactttgaaaacctcagtactgaagaaaaatccattataaaagaagaaatgttgcttgaagttaataggtttgcccttgcatctcatttcctctggggactgtggtccattgtacaagccaagatttcatctattgaatttgggtacatggactacgcccaagcaaggtttgatgcctatttccaccagaagaggaagcttggggtgtgactgtggggaggactccatccacctcatcactggactgcatggggaggcagcagagcggggtcccctctgtgcttcgactactgctcctgtggcaggaggctttgggtggctcactactgaacacatgtgtatgatactaaagacggtattaaaatggagcgacgtttatttcatctcttgtttacgatttcactaggactcagaaacgagatcgggaagcagaaatatagtgcaatagtgcaacatctctgaatccttttaatctagagaaggcatttcatatttgggggctaaggtttccagtcagatgaggcaaacagcaagagtaagcagtgttacttgcaggtactttggttaatgttgatttaaattttcatgaatgtgctggtgaacactgtgaccaggcttttgtagatggcgatgtgttatagacggtgctcactcccaagggacagcaagtgagcagagatgtactgcaaagtcgccagtcactgctgcaaggtggcctctgcctggggcctccagaagctgctcctttaccctcttggtcccatggctgaagctggagcagcggattgctctggagcagccaaggccgccagcgtgtggagcagagctctcccctcctgctgggcgtgtgtgacactgatgagtttcactgtactgcatgtgacttctcccctgcccttcctcctgatggagtgtgcagacagccatgcgtggccacgggggcagtgtgaggacctccctgtctcccggctcccctcccaggggagccagctgcttgacctagctctttgggcctctcctgccctctgctctgcctggagtgtcggatcctgtgagtaggctgggcctcccctgggcagggttctccaagggcccggtttcccggcccttacctttcctgatgcccctgacatcatcattcttgtgggagacagcagcctgtatgtggtgtggggcgtggatcgagtgtagctgtgaaatccatatatatgaaatgtcctgcgggatacagtcttagctgacttttttttactctgaactcttatttgaattgttttttgtgcatatatttctgctaccacagagattgtactatacaaataaaaaaataaaaacccaaaaaaaaaaaaaaaaaa

SEQ ID NO: 72 - DNA, 4953 bp, Homo sapiens
ggtttccggagctgcggcggcgcagactgggagggggagccgggggttccgacgtcgcagccgagggaacaagccccaaccggatcctggacaggcaccccggcttggcgctgtctctccccctcggctcggagaggcccttcggcctgagggagcctcgccgcccgtccccggcacacgcgcagccccggcctctcggcctctgccggagaaacaggatggcccaatggaatcagctacagcagcttgacacacggtacctggagcagctccatcagctctacagtgacagcttcccaatggagctgcggcagtttctggccccttggattgagagtcaagattgggcatatgcggccagcaaagaatcacatgccactttggtgtttcataatctcctgggagagattgaccagcagtatagccgcttcctgcaagagtcgaatgttctctatcagcacaatctacgaagaatcaagcagtttcttcagagcaggtatcttgagaagccaatggagattgcccggattgtggcccggtgcctgtgggaagaatcacgccttctacagactgcagccactgcggcccagcaagggggccaggccaaccaccccacagcagccgtggtgacggagaagcagcagatgctggagcagcaccttcaggatgtccggaagagagtgcaggatctagaacagaaaatgaaagtggtagagaatctccaggatgactttgatttcaactataaaaccctcaagagtcaaggagacatgcaagatctgaatggaaacaaccagtcagtgaccaggcagaagatgcagcagctggaacagatgctcactgcgctggaccagatgcggagaagcatcgtgagtgagctggcggggcttttgtcagcgatggagtacgtgcagaaaactctcacggacgaggagctggctgactggaagaggcggcaacagattgcctgcattggaggcccgcccaacatctgcctagatcggctagaaaactggataacgtcattagcagaatctcaacttcagacccgtcaacaaattaagaaactggaggagttgcagcaaaaagtttcctacaaaggggaccccattgtacagcaccggccgatgctggaggagagaatcgtggagctgtttagaaacttaatgaaaagtgcctttgtggtggagcggcagccctgcatgcccatgcatcctgaccggcccctcgtcatcaagaccggcgtccagttcactactaaagtcaggttgctggtcaaattccctgagttgaattatcagcttaaaattaaagtgtgcattgacaaagactctggggacgttgcagctctcagaggatcccggaaatttaacattctgggcacaaacacaaaagtgatgaacatggaagaatccaacaacggcagcctctctgcagaattcaaacacttgaccctgagggagcagagatgtgggaatgggggccgagccaattgtgatgcttccctgattgtgactgaggagctgcacctgatcacctttgagaccgaggtgtatcaccaaggcctcaagattgacctagagacccactccttgccagttgtggtgatctccaacatctgtcagatgccaaatgcctgggcgtccatcctgtggtacaacatgctgaccaacaatcccaagaatgtaaacttttttaccaagcccccaattggaacctgggatcaagtggccgaggtcctgagctggcagttctcctccaccaccaagcgaggactgagcatcgagcagctgactacactggcagagaaactcttgggacctggtgtgaattattcagggtgtcagatcacatgggctaaattttgcaaagaaaacatggctggcaagggcttctccttctgggtctggctggacaatatcattgaccttgtgaaaaagtacatcctggccctttggaacgaagggtacatcatgggctttatcagtaaggagcgggagcgggccatcttgagcactaagcctccaggcaccttcctgctaagattcagtgaaagcagcaaagaaggaggcgtcactttcacttgggtggagaaggacatcagcggtaagacccagatccagtccgtggaaccatacacaaagcagcagctgaacaacatgtcatttgctgaaatcatcatgggctataagatcatggatgctaccaatatcctggtgtctccactggtctatctctatcctgacattcccaaggaggaggcattcggaaagtattgtcggccagagagccaggagcatcctgaagctgacccaggcgctgccccatacctgaagaccaagtttatctgtgtgacaccaacgacctgcagcaataccattgacctgccgatgtccccccgcactttagattcattgatgcagtttggaaataatggtgaaggtgctgaaccctcagcaggagggcagtttgagtccctcacctttgacatggagttgacctcggagtgcgctacctcccccatgtgaggagctgagaacggaagctgcagaaagatacgactgaggcgcctacctgcattctgccacccctcacacagccaaaccccagatcatctgaaactactaactttgtggttccagattttttttaatctcctacttctgctatctttgagcaatctgggcacttttaaaaatagagaaatgagtgaatgtgggtgatctgcttttatctaaatgcaaataaggatgtgttctctgagacccatgatcaggggatgtggcggggggtggctagagggagaaaaaggaaatgtcttgtgttgttttgttcccctgccctcctttctcagcagctttttgttattgttgttgttgttcttagacaagtgcctcctggtgcctgcggcatccttctgcctgtttctgtaagcaaatgccacaggccacctatagctacatactcctggcattgcactttttaaccttgctgacatccaaatagaagataggactatctaagccctaggtttctttttaaattaagaaataataacaattaaagggcaaaaaacactgtatcagcatagcctttctgtatttaagaaacttaagcagccgggcatggtggctcacgcctgtaatcccagcactttgggaggccgaggcggatcataaggtcaggagatcaagaccatcctggctaacacggtgaaaccccgtctctactaaaagtacaaaaaattagctgggtgtggtggtgggcgcctgtagtcccagctactcgggaggctgaggcaggagaatcgcttgaacctgagaggcggaggttgcagtgagccaaaattgcaccactgcacactgcactccatcctgggcgacagtctgagactctgtctcaaaaaaaaaaaaaaaaaaaagaaacttcagttaacagcctccttggtgctttaagcattcagcttccttcaggctggtaatttatataatccctgaaacgggcttcaggtcaaacccttaagacatctgaagctgcaacctggcctttggtgttgaaataggaaggtttaaggagaatctaagcattttagacttttttttataaatagacttattttcctttgtaatgtattggccttttagtgagtaaggctgggcagagggtgcttacaaccttgactccctttctccctggacttgatctgctgtttcagaggctaggttgtttctgtgggtgccttatcagggctgggatacttctgattctggcttccttcctgccccaccctcccgaccccagtccccctgatcctgctagaggcatgtctccttgcgtgtctaaaggtccctcatcctgtttgttttaggaatcctggtctcaggacctcatggaagaagagggggagagagttacaggttggacatgatgcacactatggggccccagcgacgtgtctggttgagctcagggaatatggttcttagccagtttcttggtgatatccagtggcacttgtaatggcgtcttcattcagttcatgcagggcaaaggcttactgataaacttgagtctgccctcgtatgagggtgtatacctggcctccctctgaggctggtgactcctccctgctggggccccacaggtgaggcagaacagctagagggcctccccgcctgcccgccttggctggctagctcgcctctcctgtgcgtatgggaacacctagcacgtgctggatgggctgcctctgactcagaggcatggccggatttggcaactcaaaaccaccttgcctcagctgatcagagtttctgtggaattctgtttgttaaatcaaattagctggtctctgaattaagggggagacgaccttctctaagatgaacagggttcgccccagtcctcctgcctggagacagttgatgtgtcatgcagagctcttacttctccagcaacactcttcagtacataataagcttaactgataaacagaatatttagaaaggtgagacttgggcttaccattgggtttaaatcatagggacctagggcgagggttcagggcttctctggagcagatattgtcaagttcatggccttaggtagcatgtatctggtcttaactctgattgtagcaaaagttctgagaggagctgagccctgttgtggcccattaaagaacagggtcctcaggccctgcccgcttcctgtccactgccccctccccatccccagcccagccgagggaatcccgtgggttgcttacctacctataaggtggtttataagctgctgtcctggccactgcattcaaattccaatgtgtacttcatagtgtaaaaatttatattattgtgaggttttttgtcttttttttttttttttttttttggtatattgctgtatctactttaacttccagaaataaacgttatataggaaccgtaaaaa

SEQ ID NO: 73 - DNA, 2299 bp, Homo sapiens
ttggtctggggctggccacatggagcccgggctggagcacgcactgcgcaggaccccttcctggagcagccttgggggttctgagcatcaagagatgagcttcctagagcaagaaaacagcagctcatggccatcaccagctgtgaccagcagctcagaaagaatccgtgggaaacggagggccaaagccttgagatggacaaggcagaagtcggtggaggaaggggagccaccaggtcagggggaaggtccccggtccaggccagctgctgagtccaccgggctggaggccacattccccaagaccacacccttggctcaagctgatcctgccggggtgggcactccaccaacagggtgggactgcctcccctctgactgtacagcctcagctgcaggctccagcacagatgatgtggagctggccacggagttcccagccacagaggcctgggagtgtgagctagaaggcctgctggaagagaggcctgccctgtgcctgtccccgcaggccccatttcccaagctgggctgggatgacgaactgcggaaacccggcgcccagatctacatgcgcttcatgcaggagcacacctgctacgatgccatggcaactagctccaagctagtcatcttcgacaccatgctggagatcaagaaggccttctttgctctggtggccaacggtgtgcgggcagcccctctatgggacagcaagaagcagagctttgtggggatgctgaccatcactgacttcatcctggtgctgcatcgctactacaggtcccccctggtccagatctatgagattgaacaacataagattgagacctggagggagatctacctgcaaggctgcttcaagcctctggtctccatctctcctaatgatagcctgtttgaagctgtctacaccctcatcaagaaccggatccatcgcctgcctgttcttgacccggtgtcaggcaacgtactccacatcctcacacacaaacgcctgctcaagttcctgcacatctttggttccctgctgccccggccctccttcctctaccgcactatccaagatttgggcatcggcacattccgagacttggctgtggtgctggagacagcacccatcctgactgcactggacatctttgtggaccggcgtgtgtctgcactgcctgtggtcaacgaatgtggtcaggtcgtgggcctctattcccgctttgatgtgattcacctggctgcccagcaaacctacaaccacctggacatgagtgtgggagaagccctgaggcagaggacactatgtctggagggagtcctttcctgccagccccacgagagcttgggggaagtgatcgacaggattgctcgggagcaggtacacaggctggtgctagtggacgagacccagcatctcttgggcgtggtctccctctccgacatccttcaggcactggtgctcagccctgctggcatcgatgccctcggggcctgagaagatctgagtcctcaatcccaagccacctgcacacctggaagccaatgaagggaactggagaactcagccttcatcttcccccacccccatttgctggttcagctatgattcaggcttcttcagccctcccaaattgcccttgccctacctgtgctcccagaagccctcgggcatgcccagtgcaccatgggatgatgaaattaaggagaacagctgagtcaagcttggaggtccctgaaccagaggcactaggattaccccagggccatctgtgctccatgcccgcccatccccttgccgcctgactgggtcggatggccccagtgggtttagtcagggcttctggattcctcggtttctgggctacctatggcttcagccttcagctcctgggagtcccagctgttgttcccagcaacgtcgccactgccctcctactctccaggctttgtcatttcaaggctgctgaaatgctgcatttcaggggccaccatggagcagccgttatttatagaactgcctgttggaggtggggagtcctccctccattcttgtccagaaaactccttagctctcgcagtgagccatgttcttagtctccagggatggatggccttgtatatggacccctgagaatgagcaattgagaaaacaaaacaaaaggaacaatccatgaacttagattttattggtttcactcaaaatgctgcagtcatttgacctgaacttgtggcaagagacttgtgctttctaaattcaaagactagaaggaaaatggataaaaatcacaagtgccgtttctcttgc

SEQ ID NO: 74 - DNA, 8787 bp, Homo sapiens
ggccgcagctccccggcggaggcaagaggtggttgggggggaccatggctgacgttttcccgggcaacgactccacggcgtctcaggacgtggccaaccgcttcgcccgcaaaggggcgctgaggcagaagaacgtgcacgaggtgaaggaccacaaattcatcgcgcgcttcttcaagcagcccaccttctgcagccactgcaccgacttcatctgggggtttgggaaacaaggcttccagtgccaagtttgctgttttgtggtccacaagaggtgccatgaatttgttactttttcttgtccgggtgcggataagggacccgacactgatgaccccaggagcaagcacaagttcaaaatccacacttacggaagccccaccttctgcgatcactgtgggtcactgctctatggacttatccatcaagggatgaaatgtgacacctgcgatatgaacgttcacaagcaatgcgtcatcaatgtccccagcctctgcggaatggatcacactgagaagagggggcggatttacctaaaggctgaggttgctgatgaaaagctccatgtcacagtacgagatgcaaaaaatctaatccctatggatccaaacgggctttcagatccttatgtgaagctgaaacttattcctgatcccaagaatgaaagcaagcaaaaaaccaaaaccatccgctccacactaaatccgcagtggaatgagtcctttacattcaaattgaaaccttcagacaaagaccgacgactgtctgtagaaatctgggactgggatcgaacaacaaggaatgacttcatgggatccctttcctttggagtttcggagctgatgaagatgccggccagtggatggtacaagttgcttaaccaagaagaaggtgagtactacaacgtacccattccggaaggggacgaggaaggaaacatggaactcaggcagaaattcgagaaagccaaacttggccctgctggcaacaaagtcatcagtccctctgaagacaggaaacaaccttccaacaaccttgaccgagtgaaactcacggacttcaatttcctcatggtgttgggaaaggggagttttggaaaggtgatgcttgccgacaggaagggcacagaagaactgtatgcaatcaaaatcctgaagaaggatgtggtgattcaggatgatgacgtggagtgcaccatggtagaaaagcgagtcttggccctgcttgacaaacccccgttcttgacgcagctgcactcctgcttccagacagtggatcggctgtacttcgtcatggaatatgtcaacggtggggacctcatgtaccacattcagcaagtaggaaaatttaaggaaccacaagcagtattctatgcggcagagatttccatcggattgttctttcttcataaaagaggaatcatttatagggatctgaagttagataacgtcatgttggattcagaaggacatatcaaaattgctgactttgggatgtgcaaggaacacatgatggatggagtcacgaccaggaccttctgtgggactccagattatatcgccccagagataatcgcttatcagccgtatggaaaatctgtggactggtgggcctatggcgtcctgttgtatgaaatgcttgccgggcagcctccatttgatggtgaagatgaagacgagctatttcagtctatcatggagcacaacgtttcctatccaaaatccttgtccaaggaggctgtttctatctgcaaaggactgatgaccaaacacccagccaagcggctgggctgtgggcctgagggggagagggacgtgagagagcatgccttcttccggaggatcgactgggaaaaactggagaacagggagatccagccaccattcaagcccaaagtgtgtggcaaaggagcagagaactttgacaagttcttcacacgaggacagcccgtcttaacaccacctgatcagctggttattgctaacatagaccagtctgattttgaagggttctcgtatgtcaacccccagtttgtgcaccccatcttacagagtgcagtatgaaactcaccagcgagaacaaacacctccccagcccccagccctccccgcagtgggaagtgaatccttaaccctaaaattttaaggccacggccttgtgtctgattccatatggaggcctgaaaattgtagggttattagtccaaatgtgatcaactgttcagggtctctctcttacaaccaagaacattatcttagtggaagatggtacgtcatgctcagtgtccagtttaattctgtagaagttacgtctggctctaggttaacccttcctagaaagcaagcagactgttgccccattttgggtacaatttgatatactttccataccctccatctgtggatttttcagcattggaatcccccaaccagagatgttaaagtgagcctgtcccaggaaacatctccacccaagacgtctttggaatccaagaacaggaagccaagagagtgagcagggagggattgggggtgggggaggcctcaaaataccgactgcgtccattctctgcctccatggaaacagcccctagaatctgaaaggccgggataaacctaatcactgttcccaaacattgacaaatcctaacccaaccatggtccagcagttaccagtttaaacaaaaaaacctcagatgagtgttgggtgaatctgtcatctggtaccctccttggttgataactgtcttgatacttttcattctttgtaagaggccaaatcgtctaaggacgttgctgaacaagcgtgtgaaatcatttcagatcaaggataagccagtgtgtacatatgttcattttaatctctgggagattatttttccatccagggtgccatcagtaatcatgccactactcaccagtgttgttcgccaacacccacccccacacacaccaacattttgctgcctaccttgttatccttctcaagaagctgaagtgtacgccctctccccttttgtgcttatttatttaataggctgcagtgtcgcttatgaaagtacgatgtacagtaacttaatggaagtgctgactctagcatcagcctctaccgattgattttcctcccttctctagccctggatgtccacttagggataaaaagaatatggttttggttcccatttctagttcacgttgaatgacaggcctggagctgtagaatcaggaaacccggatgcctaacagctcaaagatgttttgttaatagaaggattttaatacgttttgcaaatgcatcatgcaatgaattttgcatgtttataataaaccttaataacaagtgaatctatattattgatataatcgtatcaagtataaagagagtattataataattttataagacacaattgtgctctatttgtgcaggttcttgtttctaatcctcttttctaattaagttttagctgaatcccttgcttctgtgctttccctccctgcacatgggcactgtatcagatagattactttttaaatgtagataaaatttcaaaaatgaatggctagtttacgtgatagattaggctcttactacatatgtgtgtgtatatatatgtatttgattctacctgcaaacaaatttttattggtgaggactatttttgagctgacactccctcttagtttcttcatgtcacctttcgtcctggttcctccgccactcttcctcttggggacaacaggaagtgtctgattccagtctgcctagtacgttggtacacacgtggcattgccgcagcacctgggctgacctttgtgtgtgcgtgtgtgtgtgtttccttcttcccttcagcctgtgactgttgctgactccaggggtgggagggatggggagactcccctcttgctgtgtgtactggacacgcaggaagcatgctgtcttgctgcctctgcaacgacctgtcgtttgctccagcatgcacaaacttcgtgagaccaacacagccgtgccctgcaggcaccagcacgtgcttttcagaggctgcggactttcttccagccattgtggcattggcctttccagtcttgggaggagcgcgctgctttggtgagacacccccatgcaaggtcctcagagtagccgggttctaccacaaacagaaacagaatgaaagtagctgtcagtccttgtagagagccgctctgtttcctcccagaagcatctcccagctaagctcgcattatttttctcctctggctgtttgcctgaagttcacagaacacacaaccatgaaaggctttttgaggtgagaggcccaggtggtcctggcaaccctgagtagaaggagagacggggtagggaacgggcccggccagaaaagaaccatttcttctgccatcttttatgcaccatagacatcgagactccagggggtcctggctcccctgtccctgcagccctgcaggtcagtgcatgatctgggttcgtgtcctgaccaggtgctcctcctttgatccgaggggaaagggactggtttatagaaagagcctaggagacaaaagggccagtccccctgcccagaatggagcagcagcaggacagacccccacgaggccccccagagaggaggaagatcccacggaggaacacatgaggttagggacccttgttcagcaccccaaacagcctgcctgtttaaagcaggcagcaggcttaggccttccctgcaaccccaacacccacaagtttgtttctctaggaaacacattcactgtctcagctggctgttactctctcagaccatatggcaaagttttccaagaaaatgccccgacaggggtgcccagcacactgcctgagggacaacagacatcagaacaaacccccagagagaaacagtcaaaatcagggcccggtgcagtgttgtcatgtggaacctgctttatccattgctgagtgttgaatgtgggtaatggttagggctttccagatctcagcagccaaagacagttattgttggaagactgtcatgtagataaccatgagcaatggctcgcctcagaatcagttcataaaattctatggtactggccccttcgtgggtattgtgtgaaatgagatggtggcgaggggtgcgctgtggaactgccgcagccacgcaggaggtccctgggggatgctttgggaagtccttgcccctgagcactgcctgattgccagggcctgtggaggtctaggccgcctggcagaatctagcaccgtccgaatccccgcaggacccatggagctatgaccacaccaggccattcaaatggctctgcattatcttcccttggaaggtggccactcctcggtggcagggcctttccctgaggctgcaggccgtgggctggcagcccgtctcttggcatttcaattgaaggtcaccaggtgctgggtttgaaaggaagtcactggagtgctgccaggggccgccctccaaggttaatgagaggcccacatccaggcaagaactaattcaaaaggcagatcagaaaccacaggagtcaaaattattgctccggcagtgcttcccttcctttcatccactggcctcgtgtggtccatgcagggccactgtctgccctttctgatgccacgtattaggctttcttactcagaattttgatagaaaaccatggggccaagagctctggaagcctggccggaaagaccaaggttcatgcagcccaacaaatgattgttgagcacctctcggagccaaagtccttaggcgagtgtggtgacttcctggaaggaggatgcagacttccagagagcccccccaacggacgtgctgagaagggagagggaggcgggggctgtagtcaggaaggagccagagaagaacagggtttgggtgcatccagaaatatgcctgcagtaggagggagaggaaggggtgccaccgtcaacggcttcccatcggaggtggttggtgcagatggaagtttctgtctgctggccctcaagagagtgttttgccagggacacagtctgttcctcctcagaaaacaccccccaaatgctaacaacatccccaccagctgctagaagcccctttcccctccccaccttgaagtagctcatagttctctgggcagagccagaccatccagtgtaccccagaggccagtaggttcctgcccattttcctctctggcttcctgccaagaattatggcagctgaggatgaatggagaagtaaaaacaactaacaccgcacaactaacaactaacaccgcagttcccacctgggttccacttagcaggagacatttcggagggttttttttgtttttgttcctgttttttttttttttgctggaatttgttttctcagtactgaaaagagaaaaagtgacaatcttgtatttttaaaagcctcggaaaggtgataccatctgacagtcattttctcacgttggtcttctaaagtcacctatttcttgtgtgtgcacatcacaccatttcctgtttctttataacccgacaagggtaggagtgcctgtttcccctgctgggcacaccagacaatcgtaatcacaaaacagacactgagccaggggcccaaagggtgtgatcatgagagttaccgggacagcagtaggcatgacagtcaccaggaaggacaagggtgctctgttgttagtggccacacaccaatttgacaaggagtgttgcgaaatttttatttatttatttatttattttgagatggagtttcactcttgttgcccaggctggagtgcggtggtacaatctcggctcactgcaacctccacctcccaggttcaagcgattctcctgcctcagcctcccaagtacctgggactacaggtgcgtgccaccacacccagctaaattttgtgtttttagtagagatggggtttcaccatgttggccaggatggtcttgaacccctgacctcatgatctgcctgcctcggcctcccaaagtgctgggattacaggcatgagccaccacgcccagccaaaatatttttttaaagtcattttccttaagctgcttgggctacatgtgaaatacactggacggtcaacattcctgtctcctcccatttgggctgatgcagcagatccagggaatgttacctgtttctgctgctagaagatccaggaaattgggaaggttacctgacgcacacatggatgaaggccatcatctagaaatggggtcaaccacaattgtgttaattccgtagtgtcagggattcttcgggaaggtcaacagtatgaaggattctgacccctgtgcctcccatttatgtgatcaggtgacagttaataaccgtggaggtcacactcagccatccaacagccttacagtgaccctacacaaaagcccccaaattccaaagactttttcttaacctaaaggaagaaattatttgttaattccagtagagcaactgaatatactgggctatttgtacttttttatagagaactttaataataattctttaaaaatgagtttttagaacaaagcaactgacgatttcctaagattccaatgccctggagcttgtaggaggacttagcctgggtcagctggagcacccccgacctgatctcccactgccagattttcccatgctcctagggtatggagtccacgtgggaatgactgcaagttcaggtggaacttggccgactgatgctctgcgagtttttaatagacactggggacaactgcttaaggtttagaaacttccaaaccacaggaaagacatttttagtgtcccccatccagaggcagccctggaataggattcccaggggtttctgggacccctttccttgctccgtgaggctctgtggccatcttttggcaggaggaggatgcttccttggctctgtgcccagacccgcctggtccccaggtctctcaccttgggtgaagattcagagatgccctgtaaggattttgcccactgggcaactcagaaatacttcgatctcccaagatataagaggcagcagcaaacgtgcctattgacgtctgtttcatagttaccacttacgcgagtagacagaactcggcttttcagaaaataggtgtcaagtccactttataagaacctttttttctaaaataagataaaaggtggctttgcattttctgattaaacgactgtgtctttgtcacctctgcttaactttaggagtatccattcctgtgattgtagacttttgttgatattcttcctggaagaatatcattcttttcttgaagggttggtttactagaatattcaaaatcaatcatgaaggcagttactattttgagtctaaaggttttctaaaaattaacctcacatcccttctgttagggtctttcagaatatcttttataaacagaagcatttgaagtcattgcttttgctacatgatttgtgtgtgtgaaggacataccacgtttaaatcattaattgaaaaacatcatataagccccaactttgtttggaggaagagacggaggttgaggtttttccttctgtataagcacctactgacaaaatgtagaggccattcaaccgtcaaacaccatttggttatatcgcagaggagacggatgtgtaaattactgcattgctttttttttcagtttgtataacctctaatctccgtttgcatgatacgctttgttagaaacattaattgtagtttggaagcaagtgtgtatgaataaagataatgatcattccaaaaaaaaaaaaaaaaa

SEQ ID NO: 75 - DNA, 3240 bp, Homo sapiens
actcgctgctctgcggggaggcgggcgctcccgcaggggttcctccaagatggcggcgcagaggaggagcttgctgcagagtgagcagcagccaagctggacagatgacctgcctctctgccacctctctggggttggctcagcctccaaccgcagctactctgctgatggcaagggcactgagagccacccgccagaggacagctggctcaagttcaggagtgagaacaactgcttcctgtatggggtcttcaacggctatgatggcaaccgagtgaccaacttcgtggcccagcggctgtccgcagagctcctgctgggccagctgaatgccgagcacgccgaggccgatgtgcggcgtgtgctgctgcaggccttcgatgtggtggagaggagcttcctggagtccattgacgacgccttggctgagaaggcaagcctccagtcgcaattgccagagggagtccctcagcaccagctgcctcctcagtatcagaagatccttgagagactcaagacgttagagagggaaatttcgggaggggccatggccgttgtggcggtccttctcaacaacaagctctacgtcgccaatgtcggtacaaaccgtgcacttttatgcaaatcgacagtggatgggttgcaggtgacacagctgaacgtggaccacaccacagagaacgaggatgagctcttccgtctttcgcagctgggcttggatgctggaaagatcaagcaggtggggatcatctgtgggcaggagagcacccggcggatcggggattacaaggttaaatatggctacacggacattgaccttctcagcgctgccaagtccaaaccaatcatcgcagagccagaaatccatggggcacagccgctggatggggtgacgggcttcttggtgctgatgtcggaggggttgtacaaggccctagaggcagcccatgggcctgggcaggccaaccaggagattgctgcgatgattgacactgagtttgccaagcagacctccctggacgcagtggcccaggccgtcgtggaccgggtgaagcgcatccacagcgacaccttcgccagtggtggggagcgtgccaggttctgcccccggcacgaggacatgaccctgctagtgaggaactttggctacccgctgggcgaaatgagccagcccacaccgagcccagccccagctgcaggaggacgagtgtaccctgtgtctgtgccatactccagcgcccagagcaccagcaagaccagcgtgaccctctcccttgtcatgccctcccagggccagatggtcaacggggctcacagtgcttccaccctggacgaagccacccccaccctcaccaaccaaagcccgaccttaaccctgcagtccaccaacacgcacacgcagagcagcagctccagctctgacggaggcctcttccgctcccggcccgcccactcgctcccgcctggcgaggacggtcgtgttgagccctatgtggactttgctgagttttaccgcctctggagcgtggaccatggcgagcagagcgtggtgacagcaccgtagggcagccggagaatgcagcccaagcagggcctggcatggggcaggacagggtccagccttttcctaacatctgcctgtgccacaacggccagcaggtgccccatcctctgcccacagcagactctgtcccatggctctccgggcagtagagtgtgtgagtgcagactggacctgtggttcataccttgtcaccacccgggaagctgaaggccacttcctcccagatggcctcagccaggaccatcgccctttctcagagcagagggccaggtatagaaaccgcagtgggcctgcaagccgcccgagcctccccagcagcctcctacagagcaggaagaggcgccctgtgaaccctgagtgttgcaggcccagcagaccctgctgtcccaagcccacccctcctcccaccatcacctccctcacctcgggacagtagccctccacttctccagcctctcagccctgtgctcctgcatccagagtggaacccaggctggtgtccgcatctgtccctgggccccacccctggacctgccttggttgtgtcatctgttgtaaacgttcaggaggaccagggcagcatctggggcctgggatggccacagaaggggcaggccaggtggaaaggagccagggggaagtggtctaagagacctggaactgccagaggatggcggcctgggcttccccagagccaggcgtgcgggagaggtgaggactggccccggtgggctgaggcaggggccgctgtcgtcaggcctgagccagggtgagctggtgcctgccttgcattttccttctggtgctgtgaagaccataggctggcaggcagctgagatgaactgtctttaccactgatgaggggcctctgccggctgagggtagcaagcaggggttgtgagtcaggctgggggacttgtttgaaagaaagaggagtggaaaatggttccaggagggaagaggttctttgagacacagtaccctgggaggcataggagaagggtcgggccagcccagcccagggcctgagttagactatttcccacatgttctctgccttcagtggggagggggtgccaccagggctgtcggccaggattgccactcctgtttcagaggaagcaggccgagagacttgcaccttggccaagccacacaatcagtggggcagccagagctcagacctgagccattttgtcagtatccaggaccccccggattctccacgccctccccatctcccagtctccctgccccccatgccccagaccggcccaccagggactagccgctgtcgcacagcctctggggtgcttggtctctgcgaagtcaaaggcctgacagctctgtggcctgggaatccattttcctgcggcagagcagggcctggtgtggaaccagggagctgtgggaagccacagcagaaatggaagaaaaacaggtctcagcccagggtcctcgctcactccctcactccccactttgaagccatctctgttctgcaggtgagaggatttaaagtcagtcacaaaggcttgggaacaaaaggaattctcttccaagaatgcctctgtggtgctgtttggtctctagaaacagggtcacttttttaatgtagtaaagaagtaataaatggtggcattacacattgtgatattaaaaaaaaaaaaaaaaaa

SEQ ID NO: 76 - DNA, 3084 bp, Homo sapiens
gccaggtgctcccgccttccaccctccgccctcctccctcccctgggccctgctccctgccctcctgggcagccagggcagccaggacggcaccaagggagctgccccatggacagggccccacagagacagcaccgagcctcacgggagctgctggctgcaaagaagacccacacctcacaaattgaagtgatcccttgcaaaatctgtggggacaagtcgtctgggatccactacggggttatcacctgtgaggggtgcaagggcttcttccgccggagccagcgctgtaacgcggcctactcctgcacccgtcagcagaactgccccatcgaccgcaccagccgaaaccgatgccagcactgccgcctgcagaaatgcctggcgctgggcatgtcccgagatgctgtcaagttcggccgcatgtccaagaagcagagggacagcctgcatgcagaagtgcagaaacagctgcagcagcggcaacagcagcaacaggaaccagtggtcaagacccctccagcaggggcccaaggagcagataccctcacctacaccttggggctcccagacgggcagctgcccctgggctcctcgcctgacctgcctgaggcttctgcctgtccccctggcctcctgaaagcctcaggctctgggccctcatattccaacaacttggccaaggcagggctcaatggggcctcatgccaccttgaatacagccctgagcggggcaaggctgagggcagagagagcttctatagcacaggcagccagctgacccctgaccgatgtggacttcgttttgaggaacacaggcatcctgggcttggggaactgggacagggcccagacagctacggcagccccagtttccgcagcacaccggaggcaccctatgcctccctgacagagatagagcacctggtgcagagcgtctgcaagtcctacagggagacatgccagctgcggctggaggacctgctgcggcagcgctccaacatcttctcccgggaggaagtgactggctaccagaggaagtccatgtgggagatgtgggaacggtgtgcccaccacctcaccgaggccattcagtacgtggtggagttcgccaagaggctctcaggctttatggagctctgccagaatgaccagattgtgcttctcaaagcaggagcaatggaagtggtgctggttaggatgtgccgggcctacaatgctgacaaccgcacggtcttttttgaaggcaaatacggtggcatggagctgttccgagccttgggctgcagcgagctcatcagctccatctttgacttctcccactccctaagtgccttgcacttttccgaggatgagattgccctctacacagcccttgttctcatcaatgcccatcggccagggctccaagagaaaaggaaagtagaacagctgcagtacaatctggagctggcctttcatcatcatctctgcaagactcatcgccaaagcatcctggcaaagctgccacccaaggggaagcttcggagcctgtgtagccagcatgtggaaaggctgcagatcttccagcacctccaccccatcgtggtccaagccgctttccctccactctacaaggagctcttcagcactgaaaccgagtcacctgtggggctgtccaagtgacctggaagagggactccttgcctctccctatggcctgctggcccacctccctggaccccgttccaccctcacccttttcctttcccatgaaccctggagggtggtccccaccagctctttggaagtgagcagatgctgcggctggctttctgtcagcaggccggcctggcagtgggacaatcgccagagggtggggctggcagaacaccatctccagcctcagctttgacctgtctcatttcccatattccttcacacccagcttctggaaggcatggggtggctgggatttaaggacttctgggggaccaagacatcctcaagaaaacaggggcatccagggctccctggatgaatagaatgcaattcattcagaagctcagaagctaagaataagcctttgaaatacctcattgcatttccctttgggcttcggcttggggagatggatcaagctcagagactggcagtgagagcccagaaggacctgtataaaatgaatctggagctttacattttctgcctctgccttcctcccagctcagcaaggaagtatttgggcaccctaccctttacctggggtctaaccaaaaatggatgggatgaggatgagaggctggagataattgttttatgggatttgggtgtgggactagggtacaatgaaggccaagagcatctcagacatagagttaaaactcaaacctcttatgtgcactttaaagatagactttaggggctggcacaaatctgatcagagacacatatccatacacaggtgaaacacatacagactcaacagcaatcatgcagttccagagacacatgaacctgacacaatctctcttatccttgaggccacagcttggaggagcctagaggcctcaggggaaagtcccaatcctgagggaccctcccaaacatttccatggtgctccagtccactgatcttgggtctggggtgatccaaataccaccccagctccagctgtcttctaccactagaagacccaagagaagcagaagtcgctcgcactggtcagtcggaaggcaagatcagatcctggaggactttcctggcctgcccgccagccctgctcttgttgtggagaaggaagcagatgtgatcacatcaccccgtcattgggcaccgctgactccagcatggaggacaccagggagcagggcctgggcctgtttccccagctgtgatcttgcccagaacctctcttggcttcataaacagctgtgaaccctcccctgagggattaacagcaatgatgggcagtcgtggagttgggggggttgggggtgggattgtgtcctctaaggggacgggttcatctgagtaaacataaaccccaacttgtgccattctttataaaatgattttaaaggcaaaaaaaaaaaaaaaaaaaa

SEQ ID NO: 77 - DNA, 3551 bp, Homo sapiens
gaaagaaagagaaaaaggagggcgagtggcgagcaggggcctcggccgccacccacacgccccgaagcgtgctcgtcccccgcgcggggctcccggccgccgccctcggccatcggctgctccccggtggcccaggcctcggactccgcggccggcccggcgcggcccagcgccctcagggatcatggcccaggtagcagtgtccaccctgcctgttgaagaagagtcctcctcagagaccaggatggtggtgacattcctcgtgtctgccctcgaatccatgtgtaaagaactggccaagtccaaggcagaagtggcctgcatcgcagtgtacgaaacagacgtgtttgtcgtcggaaccgagagaggatgcgcttttgttaatgccaggacggattttcagaaagattttgcaaaatactgcgttgcagagggactgtgtgaggtgaaacctccctgccctgtgaacgggatgcaggtccactcgggcgaaacggaaatactcaggaaggcagtggaggactatttctgcttttgttatggtaaagccttagggacaacagtgatggtgcctgttccctatgagaagatgctgcgagaccagtcggctgtggtagtgcaggggcttccggaaggcgttgcctttcaacaccctgagaattacgaccttgcaaccctgaaatggattttggagaacaaagcagggatttcattcatcataaatagacccttcctaggaccagagagtcagctgggtggccctgggatggtaacagatgcggagagatccatagtatcaccaagtgaaagctgcggccccatcaatgtgaaaactgaacccatggaagattctggcatttcactgaaagcagaagctgtctcagtcaagaaagaatcagaagatcctaattactatcaatataatatgcaaggaagccacccttcttccacaagcaatgaagtaatagaaatggaattaccaatggaagattccactccgctggtcccttcagaagaaccaaatgaggaccctgaagccgaggtgaaaatcgaaggaaacacaaattcatccagtgttacaaattctgcagcaggtgttgaagatcttaacatcgttcaagtgactgttccagataatgagaaggaaagattatcaagcattgaaaagattaaacagctaagagaacaagttaatgacctctttagccgaaaatttggtgaagcaattggcgtggatttccctgtgaaagttccctacaggaagatcacattcaaccctggctgtgtggtgattgatggcatgcccccgggggtggtattcaaggcccccggctatctggaaatcagttccatgaggaggatcttggaggcagctgagtttatcaaattcacagtcatcaggccgcttccagggcttgagctcagtaatgtgggaaaacgcaagatagaccaggagggccgtgtgtttcaagaaaagtgggagagagcgtatttcttcgtggaagtacagaatattccaacatgtctcatatgcaaacaaagcatgtctgtgtccaaagaatataacctaagacgccactatcaaaccaatcacagcaagcattatgaccagtatatggaaagaatgcgtgacgagaagcttcacgagctgaaaaaagggctcaggaagtatctcttaggcttgtcagacaccgagtgtcccgagcaaaaacaagtgtttgcacacccaagtccaacccagaaatcccccgtgcagcctgtagaggacctagctgggaacttatgggagaagttacgtgaaaaaatcaggtcttttgtggcatattctatcgcaatcgatgagatcacggatataaataataccacccagttggccatattcatccgtggtgtcgatgagaatttcgatgtgtccgaagaacttctggacacggtgcccatgacgggtacaaaatctggcaacgagatcttttcgcgtgttgagaagagcctgaaaaagttctgtatcgactggtcgaaattagtaagcgtggcctccactggcaccccagcgatggtggatgccaataacgggcttgtcacaaaactgaagtccagggtggcgacgttctgcaagggtgcggaactgaagtccatctgttgtataattcatccggaatcactctgtgctcagaagttgaagatggaccacgtcatggacgtggtagtgaagtccgtgaactggatatgctcccggggactgaaccacagtgagttcacaaccttgctctatgagctggacagccagtatggtagcctcctgtactacacggagattaagtggctcagtcgcgggctcgtgctaaagagatttttcgaatccttggaagaaatcgactccttcatgtcatccagagggaaacccctgcctcaactgagctccatagattggatccgagacctggccttcttggttgacatgacgatgcatctgaacgctttgaacatctctctccaaggacactcccaaatcgtcacgcagatgtatgacctgatccgggcgttcctagcaaaactgtgcctctgggagactcatttgacgaggaataatctggcccactttcccaccctgaaattggcttccagaaatgaaagcgatggcctgaactacattcccaaaatcgcggaactcaagaccgaattccagaaaaggctgtctgatttcaaactctacgaaagcgaactgactctgttcagctccccgttctccacgaagatcgacagtgtgcacgaggagctccagatggaggttatcgacctgcaatgcaacacggtcctgaagacgaaatacgacaaggtgggaataccagaattctacaagtacctctggggtagctacccgaaatacaagcaccattgcgcaaagattctttccatgttcgggagcacctacatctgcgaacagctgttctccattatgaaactgagcaaaacaaaatactgctcccagttaaaggattcccagtgggattctgtactccacatcgcaacgtgatggagagaaaactcctggcagggccctatggtgggaaaggctggagtcttctagtcccaagggattgggagatgacaaaatgaatttttttttcttttttgagatggagtcttgctctgtcgcccaggttggagtgcagtggcgtgatctcggcttactgcaacttccagctcctgggttcgaacgattctcctgcctcagcctcccgagcagctgggactacaggcgtgcgccaccatgcctggctaatttttgtattagtagagatgaggtttcaccatgttggccaggctggtctccaactcctgacctcaggtgatccacctgcctcgacctcacaaagtgctgggattacaggcatgaaccactgtgcccagctgacaaaatgagttcttaaacttttttttttttcagttttttttccactttgaatcagaaatataatctgcagtatcatacttgtttatattacattgtgtgcctcactattcattaaaaatcaagaaagttttattgt

SEQ ID NO: 78 - DNA, 981 bp, Homo sapiens
gtttggggccagagtgggcgaggcgcggaggtctggcctataaagtagtcgcggagacggggtgctggtttgcgtcgtagtctcctgcagcgtctggggtttccgttgcagtcctcggaaccaggacctcggcgtggcctagcgagttatggcgacgaaggccgtgtgcgtgctgaagggcgacggcccagtgcagggcatcatcaatttcgagcagaaggaaagtaatggaccagtgaaggtgtggggaagcattaaaggactgactgaaggcctgcatggattccatgttcatgagtttggagataatacagcaggctgtaccagtgcaggtcctcactttaatcctctatccagaaaacacggtgggccaaaggatgaagagaggcatgttggagacttgggcaatgtgactgctgacaaagatggtgtggccgatgtgtctattgaagattctgtgatctcactctcaggagaccattgcatcattggccgcacactggtggtccatgaaaaagcagatgacttgggcaaaggtggaaatgaagaaagtacaaagacaggaaacgctggaagtcgtttggcttgtggtgtaattgggatcgcccaataaacattcccttggatgtagtctgaggccccttaactcatctgttatcctgctagctgtagaaatgtatcctgataaacattaaacactgtaatcttaaaagtgtaattgtgtgactttttcagagttgctttaaagtacctgtagtgagaaactgatttatgatcacttggaagatttgtatagttttataaaactcagttaaaatgtctgtttcaatgacctgtattttgccagacttaaatcacagatgggtattaaacttgtcagaatttctttgtcattcaagcctgtgaataaaaaccctgtatggcacttattatgaggctattaaaagaatccaaattcaaactaaaaaaaaaaaaaaaaaa

SEQ ID NO: 79 - DNA, 3163 bp, Homo sapiens
cggaagctgagagggcccgcgggtaggcatggcggcgcaccttaagaagcgggtttatgaggaattcacgaaagtggttcagccacaggaggaaattgctactaagaaactccgactaacaaaaccaagtaaatctgcagcactccacatagatctgtgtaaagctacctccccagcagatgctttgcaatacttgctccagtttgccaggaagcctgtcgaggcggaaagcgtagagggagtagtcaggattctcttggaacattattacaaggagaatgatccatctgtgagactgaaaattgcatcattgttgggtttattatcaaagacagcaggattttcaccagactgcattatggatgatgccatcaacatcctgcagaatgaaaagtctcatcaagtcctagctcaactgctggatactttgcttgcaattggcactaagctaccagagaatcaagctatccaaatgcgattagttgatgtggcctgcaagcatctgacagatacgtctcatggtgtaagaaataagtgcctgcagttacttggcaatcttggctctttggagaaaagtgtcacaaaagatgcagaaggcctagctgccagagatgtccagaagattataggggattacttcagtgaccaagacccacgtgtcagaacagcagctataaaagccatgttgcagctccatgaaagaggactgaaattacaccaaacaatttataatcaggcctgtaaattactctctgatgactatgaacaagtgcgcagtgctgcagtccagcttatctgggtcgtcagtcagctctatcctgaaagcattgtcccaattccttcttctaatgaagaaatacgcttagttgatgatgcgtttggcaaaatttgtcacatggtcagtgatggctcttgggtggttcgtgttcaggcagcaaaactgttgggctctatggagcaagtcagttctcatttcttggagcagacccttgacaagaagctgatgtcagatctgaggaggaaacgtactgcacatgagcgtgccaaggaactttacagttcgggggagttttccagtggcagaaagtggggagatgatgctcccaaggaagaagtagataccggggctgtgaacttgattgagtcaggagcttgtggagcttttgttcatgggttggaagatgagatgtatgaggttcgtattgctgctgtggaggccctctgcatgttggcccagtcttcaccctcttttgctgagaagtgccttgatttcctagttgacatgttcaacgatgaaattgaggaagtacgtctgcagtctatacataccatgagaaaaatctctaacaacatcaccctccgagaagatcagcttgacactgtcctggctgtgctagaggattcatccagagatattcgagaggctcttcatgaactcttatgctgtactaatgtttcaaccaaagaagggattcatcttgcattggtggagctgctgaaaaatttaaccaagtaccctactgatagggactccatatggaagtgcttgaagtttctgggaagtcggcatccaaccctggtgcttcccttggtgccagagcttctgagcacccacccattttttgacacagctgaaccagacatggatgatccagcttatattgcagttttggtacttattttcaatgctgctaaaacctgtccaacaatgccagcattgttctcagatcacaccttcaggcactatgcctacctccgagacagtctttctcatcttgttcctgccttgaggttaccaggtagaaaactggtgtcatcagctgtttctcccagcatcatacctcaagaggatccttcccagcagttcctgcagcagagccttgaaagagtgtatagtcttcagcacttggaccctcagggagcccaggagctgctggaattcaccatcagggatctgcaaagacttggagaacttcaatctgaattggcaggagtagctgatttctctgccacctatcttcgctgtcaactacttctcatcaaggccttgcaggaaaagttgtggaatgtagctgcccctttgtatttgaagcagagtgatttggcctcagcagcagcgaaacagattatggaagagacctacaaaatggaattcatgtacagtggtgtggagaataagcaggtggtgattatacatcacatgaggctgcaggccaaagctttgcaacttatagtaacagcacgaactacacgaggacttgaccccttatttgggatgtgtgaaaaatttttacaggaagtagacttttttcagaggtatttcatcgctgatttgccccacttgcaggacagctttgtggacaaactccttgaccttatgccccgactcatgacatccaaacctgcagaagtggtcaaaattctacagaccatgctgcgacagagtgcctttctgcatctcccgcttccagagcagatccacaaagcctcagccaccatcatcgagccagcgggcgagtcagacaaccctttgcggtttacctctgggttggtggttgccctggatgttgatgcaaccctggagcatgtgcaggatcctcagaacactgttaaggtccaggtcttatatccagatggccaggctcagatgattcaccccaagcctgcagacttccggaatcctggcccagggcggcaccggctcatcactcaggtttatctctcccacaccgcttggacagaggcatgccaggtggaagtgaggctgctgctggcctacaactccagtgctcgcattccaaaatgcccctggatggagggtggtgagatgtcaccacaggtggaaaccagcatcgagggcaccattcccttcagcaagcctgtaaaagtttatataatgcccaaacctgcacggcgctaaggcaaaaacagtcttcccaaccgtggcctagagggcccttcttaggtgtcagaatgagccaagcctgaagcacttcacctggaattgatgtgtaggcttaaggagtatgtgacccttacagtctcatctggtatcaaacacaggataaattgtttcttcattaaaaaataaaaaaccttcaagtctacttacccttctcctgtccacaataaagttgagaaaacaccaaaaaaaaaaaaaaaa

SEQ ID NO: 80 - DNA, 2924 bp, Homo sapiens
gacggcgacgcggcgcaggcggcgggagtgcgagctgggcccgtgtttcggccgccgccatggccgcggtggacctggagaagctgcgggcgtcgggcgcgggcaaggccatcggcgtcctgaccagcggcggcgacgcgcaaggcatgaacgctgctgtccgggctgtgacgcgcatgggcatttatgtgggtgccaaagtcttcctcatctacgagggctatgagggcctcgtggagggaggtgagaacatcaagcaggccaactggctgagcgtctccaacatcatccagctgggcggcactatcattggcagcgctcgctgcaaggcctttaccaccagggaggggcgccgggcagcggcctacaacctggtccagcacggcatcaccaacctgtgcgtcatcggcggggatggcagcctcacaggtgccaacatcttccgcagcgagtggggcagcctgctggaggagctggtggcggaaggtaagatctcagagactacagcccggacctactcgcacctgaacatcgcgggcctagtgggctccatcgataacgacttctgcggcaccgacatgaccatcggcacggactcggccctccaccgcatcatggaggtcatcgatgccatcaccaccactgcccagagccaccagaggaccttcgtgctggaagtgatgggccggcactgcgggtacctggcgctggtatctgcactggcctcaggggccgactggctgttcatccccgaggctccacccgaggacggctgggagaacttcatgtgtgagaggctgggtgagactcggagccgtgggtcccgactgaacatcatcatcatcgctgagggtgccattgaccgcaacgggaagcccatctcgtccagctacgtgaaggacctggtggttcagaggctgggcttcgacacccgtgtaactgtgctgggccacgtgcagcggggagggacgccctctgccttcgaccggatcctgagcagcaagatgggcatggaggcggtgatggcgctgctggaagccacgcctgacacgccggcctgcgtggtcaccctctcggggaaccagtcagtgcggctgcccctcatggagtgcgtgcagatgaccaaggaagtgcagaaagccatggatgacaagaggtttgacgaggccacccagctccgtggtgggagcttcgagaacaactggaacatttacaagctcctcgcccaccagaagccccccaaggagaagtctaacttctccctggccatcctgaatgtgggggccccggcggctggcatgaatgcggccgtgcgctcggcggtgcggaccggcatctcccatggacacacagtatacgtggtgcacgatggcttcgaaggcctagccaagggtcaggtgcaagaagtaggctggcacgacgtggccggctggttggggcgtggtggctccatgctggggaccaagaggaccctgcccaagggccagctggagtccattgtggagaacatccgcatctatggtattcacgccctgctggtggtcggtgggtttgaggcctatgaaggggtgctgcagctggtggaggctcgcgggcgctacgaggagctctgcatcgtcatgtgtgtcatcccagccaccatcagcaacaacgtccctggcaccgacttcagcctgggctccgacactgctgtaaatgccgccatggagagctgtgaccgcatcaaacagtctgcctcggggaccaagcgccgtgtgttcatcgtggagaccatggggggttactgtggctacctggccaccgtgactggcattgctgtgggggccgacgccgcctacgtcttcgaggaccctttcaacatccacgacttaaaggtcaacgtggagcacatgacggagaagatgaagacagacattcagaggggcctggtgctgcggaacgagaagtgccatgactactacaccacggagttcctgtacaacctgtactcatcagagggcaagggcgtcttcgactgcaggaccaatgtcctgggccacctgcagcagggtggcgctccaaccccctttgaccggaactatgggaccaagctgggggtgaaggccatgctgtggttgtcggagaagctgcgcgaggtttaccgcaagggacgggtgttcgccaatgccccagactcggcctgcgtgatcggcctgaagaagaaggcggtggccttcagccccgtcactgagctcaagaaagacactgatttcgagcaccgcatgccacgggagcagtggtggctgagcctgcggctcatgctgaagatgctggcacaataccgcatcagtatggccgcctacgtgtcaggggagctggagcacgtgacccgccgcaccctgagcatggacaagggcttctgaggccagccatgcccacgcccctccccagcccccacccatgccagcgcagcgccagggctcagatggggcctgggctgttgtgtctggagcctgcaggcaggtgggggctgcgtccctgctcagcccatcccctgcctctatccctggccacctgccaggcctccctcgggctggtgtcttgagaccagcctgccaggccctccagcaggaggacagagtgccctggggcatccaccttcctgcccaggggacgtggcgctgtcggtgtttggaggctgctgccccctggctttggcgccccatgggccctcagcgtctccccatgctgggctcactacatgggccagcccttgctctacctggccggtaggctgctggcgcctaggttgtgttgagagggggatgcccctggccctgcctcactgtgacctgctcctgcccacgtgcagcacctgtcaccttttctagaaataaaatcaccctgactgtggggtgcatcggtctccggagaaaacaaaaaaa

SEQ ID NO: 81 - DNA, 2548 bp, Homo sapiens
ggtgggttgggccgggccggttgctaagacttggcgaagcgctgcgctcgcgcccggatccctcaggcggctgcaggcttcagcctgcgctggttggtgaaacagagatgtcagaaaaggagaacaacttcccgccactgcccaagttcatccctgtgaagccctgcttctaccagaacttctccgacgagatcccagtggagcaccaggtcctggtgaagaggatctaccggctgtggatgttttactgcgccaccctcggcgtcaacctcattgcctgcctggcctggtggatcggcggaggctcggggaccaacttcggcctggccttcgtgtggctgctcctgttcacgccttgcggctacgtgtgctggttccggcctgtctacaaggccttccgagccgacagctcctttaatttcatggcgtttttcttcatcttcggagcccagtttgtcctgaccgtcatccaggcgattggcttctccggctggggcgcgtgcggctggctgtcggcaattggattcttccagtacagcccgggcgctgccgtggtcatgctgcttccagccatcatgttctccgtgtcggctgccatgatggccatcgcgatcatgaaggtgcacaggatctaccgaggggctggcggaagcttccagaaggcacagacggagtggaacacgggcacttggcggaacccaccgtcgagggaggcccagtacaacaacttctcaggcaacagcctgcccgagtaccccactgtgcccagctacccgggcagtggccagtggccttagagggagcctgccctgcccccaccgcccaccacctcctccccttcattcctgctgctacccctggtcccgagggctgggagtacctggggccccatccccccagctgggatggtggaagccggtggtggccacggaccgcccccctcctgccagggccacagaacccgtgttcatctcatccgagagcggagttcctcacaagcactccccagcagcccttggcctctgccgtccacaggacgccctcttgctcccggaaacgtgtggtcacccgccgtccactgcacggctggtacggccttgtcttcaggtctcgaggcctgactccgggggacaggtggcagcaggtcggccgccctcccgtcctcccagagctgctggcgctgaggtcagagcgggtctgatggggagctccgtctcaccggccacccgccgtcaccatggcagatgcccttggccggaactaataagaggcgtcggggccagcttccggtcccctgcagtgatagagggcttggtgcctagctgagtcctcgctgtccccgccatcccctgatctgtgcggctccagcctcgccccctccccacgtgcaccatacctggggagttcctggtccagggtatcctggggccaccctccctgcctccaaaacagggatccctggcaggctgtctttccacgcccctgagttcagagtcggggacccaggccaggtcgggagcacagccgctccccaaacccagcaaaccggcagagagccggtttcccagcagccggagccctgcaggagaggcctttgtgttttgttttgttttgttttttctcttttgagacaagagtttcactctgtcgcccaggctggagtgcagtggtgtgatctcggctcactgcaacctctgcctcccgtgttcaagcagttctcctgcctcagcctcccaaatagctgggattacagttgcctgccaccacgcccagctaatttttatatttttagtacagatggggtttcaccatgttggccaggctggtctcgaactcctgacctcaagtgatccacccgccttggcctcccaaagtgctgggataataggtgtcagccaccgcgcccagcctggagtggccttttatgagaggggacccgtcaaatctgtgccttatggaggggtccggcagcggccacaattgtcttgtcccctcaccccccaactccccctggaacacctctcccaggcaagacattttcacagcaccattcacaacggttgggccaaaaagaaacttttccttcatcatttcctgcactcgctgaccacaactttggacaccccaggctgccacccctccccacccgttcacccccaggatgctgttgctgtaggacgcctgctgccctggagccctccccaggatgtgagccagtcccctcgctggtacggaatgccgctgggtgcccggaggcggccatggtgtctcgatggacggcagccaggatggagcacccatgggtctcacggccatgcttcagggtcttcaggtcctgcccccggccagtctgccaagaggcacccccttccccagcctctcgcctgcactgatgcagacaaaatctcacctggcaggcccaacccccccccacccctcccccgccgtgtgtggcccctcgccgcatcgttggggttttgttatgtgaaaatatcctggaaataaatacatgtttctgcacttagaaaaaaaaaaaaaaaaaaaaaaa

SEQ ID NO: 82 - DNA, 1853 bp, Homo sapiens
gagggtctgtggtcctctgatcaacataggctggtgggagtacaggactcgcctcctcagggttccctgtgctgccacttttcagccatggccacaagtgaacagagtatctgccaagcccgggcttccgtgatggtctacgatgacaccagtaagaaatgggtaccaatcaaacctggccagcagggattcagccggatcaacatctaccacaacactgccagcaacaccttcagagtcgttggagtcaagttgcaggatcagcaggttgtgatcaattattcaatcgtgaaagggctgaagtacaatcaggccacgccaaccttccaccagtggcgagatgcccgccaggtctacggcttaaactttgcaagtaaagaagaggcaaccacgttctccaatgcaatgctgtttgccctgaacatcatgaattcccaagaaggaggcccctccagccagcgtcaggtgcagaatggcccctctcctgatgagatggacatccagagaagacaagtgatggagcagcaccagcagcagcgtcaggaatctctagaaagaagaacctcggccacagggcccatcctcccaccaggacatccttcatctgcagccagcgcccccgtctcatgtagtgggcctccaccgccccccccacccccagtcccacctccacccactggggctaccccacctcccccacccccactgccagccggaggagcccaggggtccagccacgacgagagctccatgtcaggactggccgctgccatagctggggccaagctgagaagagtccaacggccagaagacgcatctggaggctccagtcccagtgggacctcaaagtccgatgccaaccgggcaagcagcgggggtggcggaggaggcctcatggaggaaatgaacaaactgctggccaagaggagaaaagcagcctcccagtcagacaagccagccgagaagaaggaagatgaaagccaaatggaagatcctagtacctccccctctccggggacccgagcagccagccagccacctaactcctcagaggctggccggaagccctgggagcggagcaactcggtggagaagcctgtgtcctcgattctgtccagaaccccgtctgtggcaaagagccccgaagctaagagcccccttcagtcgcagcctcactctaggatgaagcctgctgggagcgtgaatgacatggccctggatgccttcgacttggaccggatgaagcaggagatcctagaggaggtggtgagagagctccacaaggtgaaggaggagatcatcgacgccatcaggcaggagctgagtgggatcagcaccacgtaaggggccggcctcgctgcgctgattcgtcgagcccatccggcgacagaggacagccagaagcccagccagccccagactccagtgcaccagagcacgcacaggagcctgggcgcgctgctgtgaaacgtcctgacctgtgatcacacatgacagtgaggaaaccaagtgcaactcctgggtttttttagattctgcctgacacggaacaccaggtctgctcgtcttttttgtgttttatatttgcttatttaaggtacatttctttgggtttctagagacgcccctaagtcacctgcttcattagacggtttccaggttttctcccaggtgacgctgttagcgcctcagctggcggtgacagccggcccagcgtggcgccaccacacaccgcagagctgtccaggcacagctccgtccccagcgctcatggtgttgaaactgtctgtcatgcaccacggtgtctgtgtccacacagtaataaacggtttactgtccgcaaaaaaaaaaaa

SEQ ID NO: 83 - DNA, 1860 bp, Homo sapiens
acgtcagaaaaaaaaaaaaaaagtttgcagaatgtcccacaccgaaaaaaaaaaaaaatccgaaaccgagcgaaaaaaacctgcgagtgggcctggcggatgggattattaaagcttcgccggagccgcggctcgccctcccactccgccagcctccgggagaggagccgcacccggccggcccggccccagccccatggacctccgagcaggggactcgtgggggatgttagcgtgcctgtgcacggtgctctggcacctccctgcagtgccagctctcaatcgcacaggggacccagggcctggcccctccatccagaaaacctatgacctcacccgctacctggagcaccaactccgcagcttggctgggacctatctgaactacctgggcccccctttcaacgagccagacttcaaccctccccgcctgggggcagagactctgcccagggccactgttgacttggaggtgtggcgaagcctcaatgacaaactgcggctgacccagaactacgaggcctacagccaccttctgtgttacttgcgtggcctcaaccgtcaggctgccactgctgagctgcgccgcagcctggcccacttctgcaccagcctccagggcctgctgggcagcattgcgggcgtcatggcagctctgggctacccactgccccagccgctgcctgggactgaacccacttggactcctggccctgcccacagtgacttcctccagaagatggacgacttctggctgctgaaggagctgcagacctggctgtggcgctcggccaaggacttcaaccggctcaagaagaagatgcagcctccagcagctgcagtcaccctgcacctgggggctcatggcttctgacttctgaccttctcctcttcgctcccccttcaaaccctgctcccactttgtgagagccagccctgtatgccaacacctgttgagccaggagacagaagctgtgagcctctggccctttcctggaccggctgggcgtgtgatgcgatcagccctgtctcctccccacctcccaaaggtctaccgagctggggaggaggtacagtaggccctgtcctgtcctgtttctacaggaagtcatgctcgagggagtgtgaagtggttcaggttggtgcagaggcgctcatggcctcctgcttcttgcctaccacttggccagtgcccacccagcccctcaggtggcacatctggagggcaggggttgaggggccaccaccacacatgcctttctggggtgaagccctttggctgccccactctccttggatgggtgttgctcccttatccccaaatcactctatacatccaattcaggaaacaaacatggtggcaattctacacaaaaagagatgagattaacagtgcagggttggggtctgcattggaggtgccctataaaccagaagagaaaatactgaaagcacaggggcagggacagaccagaccagacccaggagtctccaaagcacagagtggcaaacaaaacccgagctgagcatcaggaccttgcctcgaattgtcttccagtattacggtgcctcttctctgccccctttcccagggtatctgtgggttgccaggctggggagggcaaccatagccacaccacaggatttcctgaaagtttacaatgcagtagcattttggggtgtagggtggcagctccccaaggccctgccccccagccccacccactcatgactctaagtgtgttgtattaatatttatttatttggagatgttatttattagatgatatttattgcagaatttctattcttgtattaacaaataaaatgcttgccccagaaaaaaaaaaaaaaaaaaaa

SEQ ID NO: 84 - DNA, 6453 bp, Homo sapiens
cacagggaacgggtagggtcccacggtttggggagagacatggcagtcctcaagggctgggatcagggcgcagccagggtttctgatggctttgctgatggtcaggacccaggcatgccaggcaaggcctcagcccagcagttgccaagcgtgtagccactttgggcccgtggagagagtcgcgctgcggagcccccagggggacctgaggtcacaagagcctcgatgcacctgagcgcggagctgggggtccctggagccgctgtccccacctgcggcgctggagccctggaggtgtccaggggcttccttggaacgtggagacgtgctggttaaacgtggagccccgggccagccgggcactgggggctgcaggtggagggaggtggatgctctccctcgtgggggcgtgtcttttccacaggaaagggaaagggggagggacacgggtcagcagtggggggctgtgcagtctcgcagatcttcacccttggttcttgaactctggaccctgagccctgccgagggtcccgcaaaggtgggcaaggagctcccggctgcttggtctccgcagtgttggggctgccagcagggggacgctgggcccccggggacctgacccgtgctccctccccaccccgcagtctccatcgactccatccaggaggtgagtgaggggcggcagtcggaggtcttccagcgctaccctgacggcagcttcgaccccaactgctgcttcagcatctaccacggcagccaccgcgagtcgctggacctggtctccaccagcagcgaggtggcgcgcacctgggtcactggcctgcgctacctcatggccggcatcagcgacgaggacagcctggctcgccgccagcgcaccagggaccagtggctgaagcagacgtttgacgaggccgacaagaacggggatggcagcctgagcattggcgaggtcctgcagctgctgcacaagctcaacgtgaacctgccccggcagagggtgaagcagatgttcagggaagcggacacggatgaccaccaagggacgctgggttttgaagagttctgtgccttctacaagatgatgtccacccgccgggacctctacctgctcatgctgacctacagcaaccacaaggaccacctggatgccgccagcctgcagcgcttcctgcaggtggagcagaagatggcgggtgtgaccctcgagagctgccaggacatcatcgagcagtttgagccatgcccagaaaacaagagtaaggggctgctgggcattgatggcttcaccaactacaccaggagccctgctggtgacatcttcaaccctgagcaccaccatgtgcaccaggacatgacgcagccgctgagccactacttcatcacctcgtcccacaacacctacctcgtgggtgaccagctcatgtcccagtcacgggtggacatgtatgcttgggtcctgcaggctggctgccgctgcgtggaggtggactgctgggatgggcccgacggggagcccattgtgcaccatggctacactctgacttccaagatcctcttcaaagacgtcattgaaaccatcaacaaatatgccttcatcaagaatgagtacccagtgatcctgtccatcgaaaaccactgcagtgtcatccagcagaagaaaatggcccagtatctgactgacatccttggggacaagctggacctgtcatcagtgagcagtgaagatgccaccacactcccctctccacagatgctcaagggcaagatcctcgtgaaggggaagaagctcccagccaacatcagcgaggatgcggaggaaggcgaggtgtctgatgaggacagtgctgatgagattgacgatgactgcaagctcctcaatggggatgcatccaccaatcgaaagcgtgtagaaaacactgctaagaggaaactggattccctcatcaaagagtcgaagattcgggactgtgaggaccccaacaacttctccgtctccacactgtccccatctggaaagctcggacgcaagagcaaggctgaagaggacgtggagtctggggaggatgccggggccagcagacgcaatggccgcctcgtcgtgggaagcttctccaggcgcaagaagaagggcagcaagctgaagaaggcggccagcgtggaggagggagatgagggtcaggactccccgggaggccagagccgaggggcgacccggcagaagaagaccatgaagctgtcccgggccctctctgacctggtgaagtacaccaagtccgtggccacccacgacatagagatggaggcggcgtccagctggcaggtgtcgtccttcagcgagaccaaggcccaccagattctgcagcagaagccggcgcagtacctacgcttcaaccagcagcagctctcccgcatctacccctcctcctaccgtgtggactccagcaactacaacccgcagcccttctggaacgccggctgccaaatggttgccctgaactaccagtcagaggggcggatgctgcagctgaaccgagccaagttcagcgccaacggtggctgcggctacgtactcaagcctgggtgcatgtgccagggcgtgttcaaccccaactcggaggaccccctgcccgggcagctcaagaagcagctggtgctccggatcatcagtggccagcagcttcccaagccgcgcgactccatgctgggggaccgtggggagatcatcgacccctttgtggaggtggagatcattgggctccctgtggactgcagcagggagcagacccgcgtggtggacgacaacgggttcaaccccacctgggaggagaccctggttttcatggtgcacatgccggagatcgcgctggtccgcttcctcgtctgggaccacgatcccatcgggcgtgacttcattggccagaggacgctggccttcagcagcatgatgccaggctacagacacgtgtacctagaagggatggaagaggcctccatcttcgtgcatgtggctgtcagtgacatcagcggtaaggtcaagcaggctctgggcctaaaaggcctcttcctccgaggcccaaagcccggctcgctggacagtcatgctgctgggcggcccccggcccggccctccgttagccagcggatcctgcggcgcacggccagcgccccgaccaagagccagaagccgggccgcaggggcttcccggagctggtcctgggtacacgggacacaggctccaagggggtggcagacgatgtggtgccccccgggcccggacctgctccggaagccccagcccaggaggggcccggcagcggcagcccccgaggtaaggcgccagctgcggtggcagagaagagccctgtgcgagtgcggcccccgcgtgtcctggacggccccgggcctgctgggatggccgccacatgcatgaagtgtgtggtgggatcctgcgccggcgtgaacaccgggggcctgcagagggagcggccacccagcccggggcctgcaagcaggcaggcagccattcgccagcagccccgggcccgggctgactcactgggggccccctgctgtggcctggaccctcacgctatcccggggagaagcagagaggcccccaagggtcctggggcctggaggcagggtccaggcggtagcggctccatgtcctcggactccagcagcccagacagcccgggcatccccgaaaggtccccccgctggcctgagggtgcctgcaggcaaccgggggccctgcagggagagatgagtgccttgtttgctcaaaagctggaggagatcaggagtaaatcccccatgttctccgccggtaagcccctcttgccctgcgtggtcctcccgcacgcccctggcatggctgggcctgggtcacctgctgctgcttctgcgtggacggtgtcgcctcgtgtgctcgtgctcgtggctctgtatccgtggcactgtctccgtggcactctgctcccttggcttgcctgtggcccatagccccagccctcctgtctgagcttgaggccctgggacttgggtggagctggtttgaggcccgacaggctgggaagaaccagctgctcttgctgagggtctggggccgggactgtggcctgacatgctgggcccctccggctgggcgcttccccaaactcacctcctgggcggctggcgacctgcatggcccctgatgcctttcctgggactgggggccacgtaccatcccattcccacctccctctagggcaggctccaggggtccctactgggaagtctgatgtgggcaggtagtgcagctgctgggcgtctcctgcgcccctgggacgcctggagcctgctgagtgctgcgtggagtagattccctgggccccagggcttcgctgctttgggctgaagcaccccactagaagggtgtctccttagcctggagggagggacatacacggagcccgccccacaccaccctgcccctccagacccccctgaccaagctttcctttctgcccccacccacgctgcctccgtagttaggaactgagagcggcgagtgacaggtaacggggcccagccccggtgtcccgtgctgtcccagcccaaggagggccccgtgtgcggcacagggcgtggactgggccccagcagcagcagggtggggacaccgagtgtgccgcgcccgggggatgcctcggggtgggagctgggcctggcgaccctcggcacagggcaccggggacaccaccctgatccgactcctctccgcctctctccctgcctccctctctctcttctgcttctccctctggctctctctcactcccccacctccccacagacacccgccccctctccacgcagcggccactccccccactgtgcagcctggaaaccatcgctgaggagcccgccccaggccctggtcccccgccaccagcggctgtccccaccagctcttctcagggacggcccccataccccacaggacccggagccaatgtggcaagccccctagaggacactgaggagccccgagacagcaggcctcggccgtgcaacggcgagggcgccggcggggcatacgagagggcccccggcagccagacggacggcaggagccagccccggaccctgggccacctgcccgtgattagaagggtgaagagtgaggggcaggtgcccacggagcccctgggagggtggcggcccctggccgctccctttccagctcctgccgtgtactccgatgccacgggcagtgacccgctgtggcagcggctggagccatgtggccaccgagacagcgtttcctcctcctccagcatgtcatccagcgacactgtcattgacctctccctgcccagcctgggcctgggccgcagccgtgagaacctcgctggagcccacatgggacgcctgccccccaggccccactcggcttcggctgcccgcccagacctgccacctgtgaccaagagcaaatccaaccccaaccttcgggctacaggccagcggcctcccatacctgacgaactgcagcccaggtccctggccccaaggatggctggcctccccttccggcctccctggggctgcctttccctggtgggcgtgcaggactgccccgtggctgccaagtccaagagcctgggcgacctcactgctgatgactttgcccctagctttgagggcggctcccgcagactgagccacagcctgggcctcccgggagggacacggcgggtgtcggggccaggggtgagacgggacaccctgacagagcagctgcgctggctcactgtcttccagcaggcaggagacatcacgtcacccaccagcctgggcccggctggggagggggtggcagggggccctggttttgtgcggcgctcctcctcccgcagccacagccgcgtgcgtgccattgccagccgggcccgccaggcccaggagcggcagcagagactgcagggcctgggccggcagggacccccagaagaggagcggggcacccccgagggcgcctgctccgtgggccacgagggcagtgtggatgcaccagcaccctccaagggagccctcgggccagcatccgcggctgctgaaaacctggtcctgctccgcctctgaccgtcagtggtgggaacctgggcggctctggaggcccagggcaggggtgggcgtgttgtttgctcaggaaacagggcagccaggcccccaaaactgtgtccccctggctgccctgtgtcccctccacccctgcctccctcctgcccctgctcccggggaggaaaggctaaagctgctggcccggggcccacaggaggggcttcgaggctggccctgccaggcagttttcccggcgttttaggatctgtacatagagaaatatttaaatttttagaagcaaaacttatacaacattaaaatgataccaagtccctttc

SEQ ID NO: 85 - DNA, 4722 bp, Homo sapiens
atgtctgagagccccaaggacgagggctccgaagagtgtctgtttctgcagcgcctatgggagtggggggcagtggggggaactcagggaagctgcctacaacttgaggccttccccaggctggaggaggaggacagggaaggccgaggggagctgtcctccggctgccatcaccctgatgaggcggccctgccccgggctgtggtctccgcaggggctggcaaccttgcctttgtccagctctctccgtggccaggcctgccatctgcctgcccacactcctccccggcaaagccccttgcaaatgcttgctttggggactggcagctttcgcctctgaatcaggacctagcatcagtactctggggagggggtccaggtgccaaccctgtgagtccctccctgtcccctgacgctgagaaggccctgccaacccccaccatgtgtgaggtgatgcccacaatcaatgagggggaccgcctgggtccccctcatggcgccgatgctgacgccaacttcgagcagctgatggtgaacatgctggacgagcgggagaagttgctggagtctcttcgggagagtcaggagaccttggcggccacacagagccggctccaggatgccatacacgagcgggaccagctccagcgccaccttaactccgccctcccccaggaatttgccaccttaacccgggagctgagcatgtgtcgggagcagcttctagagcgggaggaagagatatcagaactgaaagcagaacggaataacacacggctgcttctggaacatctggagtgcctggtgtcccgccatgaacggtcactgcggatgactgtggtgaagcgccaggcccagtcaccttcgggggtctccagtgaggtggaggtgctgaaggccctcaagtcactgtttgagcaccacaaggccctggatgagaaggtgcgagagcggctccgggcagcgctggagcgagtcaccaccttggaggagcagctggcaggtgcccaccagcaggtgtctgccctgcagcagggggcaggggtgcgggatggagcggcagaagaggaggggactgtggagctggggccgaaacgcctgtggaaggaggatacgggccgggtagaggagctgcaggagctcctggagaagcagaactttgagttgagccaggcccgggagcgactggtcaccctaacaacaaccgtgactgaactcgaggaggacctgggcacggcccgccgggacctcatcaagtcggaggagctgagcagcaagcatcagcgggacctccgggaggctctggcccagaaggaggacatggaagagcggattactacactggagaagcgctacctggctgctcagcgtgaggcaacatccatccatgacctcaatgacaagctggagaatgagctggccaacaaggagtccctgcaccgccagtgtgaggagaaggcccgacacctgcaggagctgctggaggtggcagagcagaagctgcagcagacgatgcgcaaggcagagacgctgccagaggtggaggctgagctggcccagagaattgcagccctcaccaaggctgaagaacggcatggcaacattgaggagcacctgcggcagctggagggacagctggaggagaagaaccaggagctggcacggacggctgtgcaggtgcgccagcgggaaaagatgaatgaggaccacaacaagcggctgtcggacacagtggaccggctgctcagcgagtccaacgagcgtctgcagctccacctgaaggagcgcatggctgccctggaggagaagaacacgttgatccaggagttggagagctcccagcggcagattgaggagcagcaccaccacaagggccgcctgtctgaagagattgagaagctgcgccaagaggtggaccagctgaagggccgaggggggccgtttgtggatggcgtccactccaggtcgcacatgggcagtgcagcagacgtgcggttctccctgggcacaaccacacacgcacccccaggcgtgcatcgccgctactcggcattgagggaagagtctgccaagctggccctgcctttgacagtgaccctgagatctccgacgtggatgaggatgagccagggggtctgctgcaacttagagtaccacagttcagggaccctctgtgggtcatcaggcccgctgccagtgccggagatgattcaggaagagaaggagtccacggagctccgcgcggaggagattgagacgcgtgtaaccagtggcagcatggaagccctaaacctgaagcagctgcgcaagcgtggttccatccccacctctctgacggccctgtccctggccagcgcgtccccaccactcagcggccgctccacacctaagctcacctcccgcagtgctgcccaggacctggaccgaatgggggtcatgaccctgcccagtgacttaagaaagcataggaggaagctgctgtcgccagtgtctcgggaagagaaccgagaggataaagccaccataaaatgtgagacttctcctccttcctcacccaggacgctgcggctagagaagcttggccacccagccctgagccaggaagaaggcaagagtgccttggaggatcagggcagcaaccccagcagcagcaacagcagccaggactccctgcacaagggcgccaagcgcaagggcatcaagtcgtccattggccgcctgtttgggaagaaggagaagggcaggctgatccagctgagtcgggatggagccacaggccatggtctctgtccccttcctaacggagttctgctaacagactccgaattcagtatgcaggagcctatggtgcctgccaagctggggacccaggcagagaaggaccggcggctaaagaagaaacaccagctgcttgaagatgcccgcaggaaaggaatgccctttgcccagtgggatggtcctactgtggtctcctggttggagctctgggtggggatgcctgcctggtatgtggcagcctgccgggccaacgtcaagagtggtgccatcatgtccgctctgtcggacacagagatccagcgggagatcggcatcagcaatgccctgcaccggctcaagctccgcctggccattcaggagatggtgtcattgaccagcccctctgccccacccacctccaggacttcttctgggaatgtctgggtcacccatgaagagatggaaactctggaaacatctactaaaacaaccctggcctatggggacatgaaccatgagtggattgggaatgaatggctacccagcctggggctcccgcagtaccgcagctacttcatggagtgcctggtggacgcccgcatgctggaccacctcaccaagaaggacctgcgggtccacctgaagatggtggacagcttccatcgaaccagtcttcagtatggcatcatgtgtctgaagaggctgaattatgaccggaaggagctggagaagaggcgagaggagagccagcatgagatcaaggatgtgttagtctggaccaacgaccaggtggttcattgggtccagtctattgggctccgggactacgcaggaaacctgcatgagagtggtgtgcatggagccttgctggccctggacgagaacttcgaccacaacacactggccctgatcctccagatccccacacagaacacccaggcacgccaagtgatggaaagagagttcaataacctgttggccttgggcacagaccggaagctggatgacgcagggcgtgaggatggcaattccaacagggccctcgggcctctggtgtcccccatggtgcagggggatgacaaggtgtttcgccgcgcgccctcctggaggaagcgcttccggccgcgggagcaccacggtcgcggcggcatgctcagcgcttccgcggagaccctcccggcgggcttccgtgtgtccaccctggggaccctgcagcccccaccggccccgccaaagaagatcatgcctgaagctgcactaacgctccgcggggagcgtgtgtgcgcactaacccgccgctctgtgtgttctcccgcggctgccgacttctcccagctgggacggcggggtcgcagagactggagacctccacggttcggacctactcctgctgaccccccatcctcccgccccgggtctgacgggggagtgcccgtggctcggggtaagtgggccaggcccggggacgcgggcaccttgctgctggccctcggccccacgcacctgcccttggctgccggcctggccctgccgctccagtcccgcttaccagcactgcctggcttgccccttcctgcttcgtctggcctggggcgctttgcgcttggagcacgctgcgttgccgctgtcgcacacatcctacaacctctctcgcagatgccctgcaacctgcctcacactcctagtctcgtccgtgactttccggttgccctggatctcagaatatattcgtccaccccctcggcaccccattaccccgagtcccaccgtgtgtccgttgctgatggtgccccaaacatggatggagcaaggacagcagagtccatgggcacaagtgacaggagggagtgggacaaggcaccctggacacagcccagggagggaaaacagaggaatgctccaagcagtgaggggcagggagtctggatccgagtggggacctgtggcaaagggggacagggatga

SEQ ID NO: 86 - DNA, 2487 bp, Homo sapiens
ggcgatggaggcggtggaactacctttctctagaagagacacgtacatgcacacccccaccgtgtagcttgccgggaaactgagtcttcctgatttcgtgtggctgtctccaaggaggaaacgaactacgcatcccaagatgcatcgcgcataggcaatatggtcccgctactggacccatttcctacctgggaaatggagtcgaagctgactcaaaacgtaacggcccaattgtccttgagacttcattccccagcaagctcagcgtgtaacgtgcgctatggagccgaaagtcgcagagctgaagcagaagatcgaggacacgctatgtccttttggcttcgaggtttaccccttccaggtggcatggtacaatgaactcttgcctccagccttccacctaccgctgccaggacctaccctggccttcctggtactcagcacgcctgccatgtttgaccgggccctcaagcccttcttgcagagctgccacctccgaatgctgactgacccagtggaccagtgtgtggcctaccatctgggccgtgttagagagagcctcccagagctgcagatagaaatcattgctgactacgaggtgcaccccaaccgacgccccaagatcctggcccagacagcagcccatgtagctggggctgcttactactaccaacgacaagatgtggaggctgacccatgggggaaccagcgcatatcaggtgtgtgcatacacccccgatttgggggctggtttgccatccgaggggtagtgctgctgccagggatagaggtgccagatctgccacccagaaaacctcatgactgtgtacctacaagagctgaccgtatcgccctactcgaaggcttcaatttccactggcgtgattggacttaccgggatgctgtgacaccccaggagcgctactcagaagagcagaaggcctacttctccactccacctgcccaacgattggccctattgggcttggctcagccctcagagaagcctagttctccctccccggaccttccctttaccacacccgcccccaagaagcctgggaatcccagcagagcccggagctggctcagccccagggtctcaccacctgcatcccctggcccttgattttctcccatgtggaccctgatttatggtggtacttgctaggacttaattggctttggcaaagcaaaaggttttgagtacaagattactatttttgataatatagtagagatcttccatgaagataacaaggctcaaggaagttaggtttggccaagataaaggccagggaaccagaattcccatctgccttcaaatgagttttttttttttttttagacagagtcttactctgtcacctaggctggagtgcagtggcacagtctctactcaggaggctgaggcagtagaatcatttgaaccagggaggcagagattgcagtgagccgagattgcatggctgcactctagcctgggtgacagtgtgagactctgtctcaaaaaaaaaaaaaaaagtacctacctcaggtagggactgaataaacacgtgtaaggcactttggaaaaatacctggcatatatagtaagcagtatgttggccattaccaaaggccctgggaattctgtactgctgctcatgggtgtagtcggttctagaggggtgggcaggtgggagtagctgaggaagacaagtggctggaatggtatcacatgatacacagaagtatcctcagttctgaatctaccttggcctcaagggcccaggagaataacttttcccagctgacagcctctctgaggacaatgacatatgaatgaggatcaaaacgagctttggccaggcactgtggcgctcacctgtaatcccaccattttgggaggctgaggcggaggaccgcctgaggcaaggaattcagaaccactctgggcaacataatgacactaaaaaagactatctctaatcaaggctagaaccaagggaaggctaagaattgcccagtactgtgcaactacgaaagccctacccaaggccaccagccttgtcttcctctttcctctgtcagttcaaaaagaacagaaacctccagctcttttacatagcaggtaccaggcatttatcagaagaggccaagcttctggttcccatgcagccctttgaatagtgtgtctaaacaaaaataggtgtccaagtagtcacactgagactttaactggtaacccagcctgtggcgtcagtcgcagtgctctggccaacactatagcagggcttattcttctccctcatgtgtagtgaaacaaaatgtaacaccttgggttcattcagttccattccctatatctacctgtgtcaatataattccctgatttggaggcagctctcctcattttccccaaaacagggaaagcaaggagtaaattcctcttaaaatcaaaagctaataatatgcttcctaaaataaagactcatcaaggtctca

SEQ ID NO: 87 - DNA, 1074 bp, Homo sapiens
atgtcgtttcagttctcagagaacttggatccgagcggagggtggatgtttggggtccaacacattggttttcccgaaaaccagctctctgcccccctgctctccgggactctcccactcacccaccatcggcctcctgggccgcggtctgaagctgcgaccttgttcctgaggtttcgcgttttctggatgtcacgggggacagctctggaaaggggacgctcactcccttcacaaggggccaggcggggcactgcgcgggagaagccgccggagcggtcccactgccaccctccagctgttcgcggggctggaagcagctccagtgcccagacacggtgccgcgaccggcttggaccaggacgctggccaagtagcccgagcccatctcaagagaacacgccagccgtcaggacacgcagaagcagcctgacctccctcgaccttcaccttccacccgcgaccgcggaaccgcggacgactctgctccggccagtttttccgtacggcggacgaattccccgggggcagttctcacgacaggctgtgagagccgggactccccaaactttcccaccccaccttcgaggccgcagaaaggcgccgctccgaggcctaggagggcgcgggcggcggtggggaggctgggacctggaccttgccggcgcactgcggagagggagccgcagagagttccgcttcctcgccgctgccggggtccattctagcggcctgagcgctgcctgggcgcgcagatctgggttgggcctcctgacgccccaaggccacggggtccgtgcgccgcgcaactctgcggggactccaggccgggtcttggcagcggcccgcctgagcgccgggagccgtggtttggagagcgctcagggcgccccggccgccacaaagcgggttaaagtctattttccactcgactgctccgaaaagcccccgcgcgccgacgccgttccggcccccttgggcgaggtggggaggggcggccaggggtggggaggcgaggcggccgcacccagcactcctccgcgtcctgggaaccccggggcctggcacggctga

SEQ ID NO: 88 - DNA, 4777 bp, Homo sapiens
ccctcggccttagctagaagtcgaaacaaaacaagccgctaaggcggtggcggcggcgccgggacgggggaggggcgcgccggaaccggaaccgacctgcgccggaaccggaacggagagcgggttgccagggcccgaagagggctggctgcggcggtctcgctcggctgtccgttccttgctggagaatttggccacaaagagttgccaagatagctgggccaggaagaaagcgccgcagccctgacccagacgctgttgccgaccccggggcactctggctgtcgaccaagcggctcaagatgtctggcggggccagtgccacaggcccaaggagagggcccccaggactggaggacaccactagtaagaagaagcagaaggatcgagcaaaccaggagagcaaggatggagatcctaggaaagagacagggtctcgatatgttgcccaggctggtcttgaacctctggcctcaggtgatccttctgcctcagcctcccatgcagctgggatcacaggctcacgccaccgtacccggctgttctttccttcatcgtcagggtcagcatccactcctcaagaggagcagaccaaagaggagttgttgctcgattggaggcagagtgcagaagaggtgattgtcaagcttcgtgtgggagtaggtcccctgcagctggaggatgtagatgctgctttcacagatacagactgtgtggtgcggtttgcaggtggtcagcagtggggtggtgtcttctatgctgagataaaaagctcttgtgctaaagtgcaaacccgcaagggcagtctcctgcacctgacactgcccaaaaaggtgcctatgctcacgtggccctccctcctgaagaaacctctagggacccaggagctggtgccggggctgcggtgccaggagaatgggcaggaactgtctcccattgccctggagccaggccctgagccccaccgggctaagcaggaggcccggaaccagaagcgggcccagggccgtggtgaggtaggcgcaggggctggccccggggcccaggcagggcccagcgccaagagggctgtgcatctctgcagagggccagagggggacgggtccagggatgaccctggaccccggggtgatgccccacccttcgtggctgacccagccacccaggttgaggctgatgaacagctttgcataccaccgctgaactcccaaacctgcctcctgggctcagaggagaatttagcccctttggcaggagagaaagcagtgcctcccgggaatgacccagtctctccagccatggtccggagcagaaaccctgggaaagatgactgtgccaaggaggagatggcagtggcagcagatgctgcaaccttggtggatgagcccgagtcgatggtgaacctggcgtttgtcaagaatgactcgtatgagaagggcccggattcagtggtggtgcacgtgtacgtgaaggagatctgcagggacacctcaagagtacttttccgtgagcaggacttcacgctcatcttccagaccagggatggaaacttcctgaggctgcacccgggctgtgggccccacaccaccttccgttggcaggtgaagctcaggaatctgattgagccagagcagtgcaccttctgtttcacggcttctcgcatcgacatctgccttcgtaagaggcagagtcagcgctgggggggcctggaggccccggctgcacgaggtgcagtgggtggtgcaaaggttgccgtgccgacaggtccaacccctctggattcaaccccaccaggaggtgctccccaccccctgacaggccaggaggaggcccgggctgtggagaaggataaatccaaggcacgatctgaggacacagggctagacagtgtggcaacccgcacacccatggagcatgtaaccccaaagccagagacacacctggcctcgcccaagcctacatgcatggtgcctcccatgccccacagcccagttagtggagacagcgtggaggaggaggaagaggaagagaagaaggtgtgtctgccaggcttcactggccttgtcaatttaggcaacacctgcttcatgaacagcgtcattcagtctctgtccaacactcgggaactccgggacttcttccatgaccgctcctttgaggctgagatcaactacaacaacccactagggactggtgggcgtctggccattggctttgccgtgctgcttcgggcgctgtggaagggcacccaccatgccttccagccttccaagttgaaggccattgtggcgagtaaggccagccagttcacaggctatgcacagcatgatgcccaggagttcatggctttcctgctggatgggctgcacgaggacctgaatcgcattcagaacaagccctacacagagaccgtggattcagatgggcggcccgatgaggtggtagctgaggaagcatggcagcggcacaagatgaggaatgactctttcatcgtggacctatttcaggggcagtacaagtcgaagctggtgtgccctgtgtgtgccaaggtctccatcacttttgacccgtttctttatctgccggtgcccttgccacaaaagcaaaaggttctccctgtcttttattttgcccgagagccccacagcaagcccatcaagttcctggtgagcgtcagcaaggagaactccactgcgagcgaagtattggactccctctctcagagtgttcatgtgaagcctgagaacctgcgtttggcggaggtaattaagaatcgttttcatcgtgtgttcctaccctcccactcactggacactgtgtccccatctgatacgctcctctgctttgagctgctatcctcagagttggctaaggagcgggtagtggtgctagaggtgcaacagcgcccccaggtgcccagcgtccccatctccaagtgtgcagcctgccagcggaagcaacagtcggaggatgaaaagctgaagcgctgtacccggtgctaccgtgtgggctactgcaaccagctctgccagaaaacccactggcctgaccacaagggcctctgccgacctgagaacattggctaccccttcctggtcagtgtacctgcctcacgcctcacttatgcccgcctcgctcagttgctagagggctatgcccggtactctgtgagtgtattccagccaccctttcagccaggccgcatggccttggagtctcagagccctggctgcaccacactgctctccacaggttccctggaggctggggacagcgagagagaccccattcagccacctgagctccagctggtgacccctatggctgagggggacacagggcttccccgggtgtgggcagcccctgaccggggtcctgtgcccagcaccagtggaatttcttctgagatgctggccagtgggcccattgaggttggctccttgccagctggcgagagggtgtcccgacccgaagctgctgtgcctgggtaccagcatccaagtgaagctatgaatgcccacacaccccagttcttcatctataaaattgattcatccaaccgagagcagcggctagaggacaaaggagacaccccactggagctgggtgacgactgtagcctggctctcgtctggcggaacaatgagcgcttgcaggagtttgtgttggtagcctccaaggagctggaatgtgctgaggatccaggctctgccggtgaggctgcccgggccggccacttcaccctggaccagtgcctcaacctcttcacacggcctgaggtgctggcacccgaggaggcctggtactgcccacagtgcaaacagcaccgtgaggcctccaagcagctgttgctatggcgcctgccaaatgttctcatcgtgcagctcaagcgcttctcctttcgtagttttatctggcgtgacaagatcaatgacttggtggagttccctgttaggaacctggacctgagcaagttctgcattggtcagaaagaggagcagctgcccagctacgatctatatgctgtcatcaaccactatggaggcatgattggtggccactacactgcctgtgcacgcctgcccaatgatcgtagcagtcagcgcagtgacgtgggctggcgcttgtttgatgacagcacagtgacaacggtagacgagagccaggttgtgacgcgttatgcctatgtactcttctaccgccggcggaactctcctgtggagaggccccccagggcaggtcactctgagcaccacccagacctaggccctgcagctgaggctgctgccagccagggactaggccctggccaggcccccgaggtggcccccacgcggacagcccctgaacgcttcgccccccctgtggatcggccagcccccacctacagcaacatggaggaggtggattagcaggtccctggctgatgggggggactgggtttgggacacccacacagagggccagctccttgccgcttctccttctctaacccagaggacactggctctgtcaatgggaagctgaggggtatgatttgggtgtggagacctctcaggttgggacttcttgtcagcttggacccctgaccagtgggctttggcttctccagccgcctccagtgctgcgtgatttgattctgttgtaccttcaattcttctgacccgcattataaacattataattttattctaaaaattgtaattttttttgcattttggaagtgactgctgctgtttaaatatattttaaaaataaataataagtaagtagactt

SEQ ID NO: 89 - DNA, 2521 bp, Homo sapiens
atggccatggctgacattgaggagggagctggcagagggaatgatggccatggcagacggcgagtaccgagcgtgggtggccgcggtgtccgtgggccacgctcagctgcgctgccgggccgcgagtcggacgaagacactgaggatgctagtgaaactgacctggcaaagcatgatgaagaagactatggggaagtgaaggaacagatgtatcaggacaaactggcttctctcgagaggcagttgcaacaactacaagaaggtacattacaggaatatcagaagagaatgaaaaaactaggtcagcagtacaaagagaggatacggaatgctgaactcttcctccagctggaaactgaacaagtgggacgaaattacatgaaagaaaagaaggcagcagtgaaagaatttgaagacaagaaggttgagctgaaagagaacctgattgctgagctagcagaagagaagaaaatgattgaaaacgaaatgctgacaatggaactgaatggagattctatgcaggtgagacctatcatgaccagaaagttgcggaggcgaccaaatgatcccgtccccatcccagacaagaggaggaaacctgctccagcccagctaaactatttgttaacagatgaacagatcatggaggatctgagaacattaaataagcttaagtcacccaagagaccagcatctccatcctctcctgagcacttgcctgcgacacccgcggaatctccagcccagaggtttgaagctcggatagaagatggcaaactgcactatgacaaaagatggtaccacaagagccaggccatctatctggagtcaaaggacaaccagaaactgagctgcgtgatcagttctgtaggagccaatgagatctgggtgaggaagacaagtgacagcaccaagatgaggatctacctgggccagcttcagcgcgggctcttcgtcatccaccggcgctcagctgcttgactttctacagtgctcttctcttgaccctttttctggagtgggttttatttttgttttgttttgttttcttcttaacagaaaaatgttaacttactgggagtagctactcagccttagaaatggagagcattgtagtggattctttaaggcacttttgtggccagccccttccaacttcctcagtcttttctgcctcaacttcttccagacatcagtcaccatgagactgttttactttcaggagtattggggggtttgatttactttccttttatttctttgttttttgcttatacttgtttttgaaaacctcctctgagtttgaagggacagctatttttattaattatctttaagtctctctgccatggagaagagcaggaaggcatacactgtccagtgcattttcattagtggatcacgtagctactttccctgtcgagtccaattcactatttcctcagaagcttggggcagaggtcctagcagaaggagatgaattctcctggctctcagccttcttggagaaataaatgctttgtgtaacatctgtgcacaccatccattccactggctgagcgatggaaaagcttgcctgggagactctgtgcactgaagtaaatggggttgggggaggggacatttcatatttataatgtgctgaaggtaccatattttaaatgttatttaatgcggtgatttattcaaacatttattctagcttaagctggaataagaagtggtcatttcagaagttttcatttgtaattccttcctctcccttgttcccaagtaggtagtagtagtatgtgccacaggctgattatctgggtaatctcttatgggtgggaggtgagattgatagtgcagtaatcagtgatctatagacccgcatgcacgattcaagtttcactcttgtggctgatgccatcattgcacattggccattccaaacctgcggagaactttgttgtcaggccctcagcactcagagcttcatttggcccaggttgaagacaaggaaagctctgccgtggctgcctctgcactgacaccctccctaatgagtcctgatgaaacagcctttcctacatccttccctcattcccatgattggagaaatgattcattgggtgatgagtgttggggttttccatactcatgttgccatcttgagatgtttaaaaaatttggggttagagcaactgttagcgtctccatgggcaatcagtagaacttacacattccaggaaatctttctttgtaaataattcttttggtctcaagtgattcccttcaagttgtctcttgatgtacaaaccccaaagcaagttggggggctgtgatgacaattaaatcaccttctctgaagttctggctctacagagaccagaacttactgacttgtgcagacttgtacaagtaaagacttatacagatagatttttgttttaacttataatctgttttttcctcttttttttttttctggtgttggagtcctatttagaaaacaggataaatgacgctgttataaaaa

SEQ ID NO: 90 - DNA, 6113 bp, Homo sapiens
atgcggtactggttgcttccaccttttttggcaattgtttatttctgcaccattgtccaaggtcaagtggctccacccacaaggttaagatataatgtaatatctcatgacagtatacagatttcatggaaggctccaagagggaaatttggtggttacaaacttcttgtgactccaacttcaggtggaaaaactaaccagctgaatctgcagaacactgcaactaaagcaattattcaaggccttatgccagaccagaattacacagttcaaattattgcatacaataaagataaagaaagcaagccagctcaaggccaattcagaattaaagatttagaaaaaagaaaggatccaaagcccagagtcaaagttgtggacagaggaaatgggagtagaccatcttcaccagaagaagtgaaatttgtctgtcaaactccagcaattgctgacattgtaatcctggtcgatggttcatggagtattggaagattcaacttcagactggttcggcatttcttggaaaacctggttacagcattcgatgtgggctcagagaagacacgaattggtcttgcacagtatagtggtgaccccagaatagaatggcacttgaatgcatttagcacaaaagatgaagtgattgaagctgtccgaaacctcccatataaaggaggaaatacactaacaggtcttgctttgaactacatttttgaaaatagcttcaaaccagaagcaggatcaaggactggagtatccaaaattggcattttaatcacagatggaaaatcccaagatgacattattccaccatctagaaatcttcgtgagtctggtgtagaactgtttgccataggggtgaaaaacgcggatgtgaatgagctgcaggagatcgcctctgaaccagacagcactcatgtgtacaatgttgccgaattcgatctgatgcacacagttgtggagagtctgaccaggactctctgctctagagtggaagaacaggacagagaaattaaagcctcagcccatgccatcactgggccgcctacggagttgattacttctgaagtcactgccagaagctttatggttaactggactcatgccccaggaaatgtggaaaaatacagagttgtgtattatcctaccaggggtggaaaaccagacgaggtggtggtagatggaactgtatcttccacagtgttgaaaaacttgatgtctttaactgaatatcagatagcagtctttgcaatctatgcccacactgctagtgaaggcctacggggaactgaaactacacttgctttaccgatggcttctgaccttctactgtacgacgtgactgagaacagcatgcgagtcaaatgggatgcagtgcctggggcctcaggttacctgatcctttatgctcctctaacagagggcctggctggggatgaaaaagagatgaaaattggagagacccacacagatattgaattgagtgggttgttgcccaatacagaatacacagtcacagtttatgccatgtttggagaagaggccagtgatcctgttacgggacaagaaacaacattggctttaagtccaccaagaaacctgagaatctccaatgttggctctaacagtgctcgattaacctgggacccaacttcaagacagatcaatggttatcgaattgtatataacaatgcagatgggactgaaatcaatgaggttgaagtcgatcctattactaccttccctctgaagggcttgacacctctcacagagtatactattgctattttctccatctatgatgaaggacagtcagagcctctgactggagtttttaccaccgaggaagttccagcccagcaatacttagaaattgatgaggtgacgacagacagttttagggtgacctggcatcccctctcagctgatgaagggctacacaaattgatgtggattccagtctatggggggaagactgaggaggttgtcctgaaagaagagcaggactcacatgttattgaaggcctggagcccggtacggagtatgaagtttcactattggccgtacttgatgatggaagcgagagtgaggtggtgactgctgtcgggaccacacttttccagacgggaatcagaaacctagttgtaggtgatgaaactacttctagcctgcgggtaaaatgggacatttctgacagcgatgtgcagcagtttagggtgacctacatgacagctcaaggggaccctgaggaagaagtcataggaacggttatggtgcctggaagccagaacaacctccttctgaagcctctgcttcctgatactgaatacaaagtcacagtgactcccatctacacggatggcgaaggcgtcagcgtctccgctcctggaaaaaccttaccatcctcggggccccagaacttgcgggtgtccgaggaatggtataaccggttgcgcattacgtgggaccccccatcttccccggtgaaaggctatagaattgtctacaaacctgtcagtgttcctggtccaacactggaaacgtttgtgggagctgacattaacaccatccttatcacaaacctcctcagcggaatggactacaatgtgaagatatttgcctcccaggcctcaggcttcagcgacgccctgacaggcatggtgaaaacattgttcttgggtgttaccaatctccaagccaaacatgttgaaatgaccagcttgtgtgcccactggcaggtacatcgccatgccacagcctatagggttgttatagaatccctccaggataggcaaaagcaagaatccactgtgggtggagggacaaccaggcattgcttctatggacttcagcctgattctgaatataaaatcagtgtttatacaaagctccaggagattgaaggacctagtgtgagcataatggaaaaaacacaatcacttcctacacgaccaccaacttttcctccaaccattccaccagcaaaagaagtatgtaaggcggccaaggctgacctggtatttatggtggatggatcctggagcattggagatgaaaatttcaataagatcatcagctttctatacagcactgttggagccctgaacaagattggcacagatggaacccaagttgcaatggttcagttcactgatgatcccagaacagaatttaaactaaatgcttacaaaaccaaagagactcttcttgatgcaattaaacacatttcatacaaaggaggaaatacaaaaacaggaaaagcaattaagtatgttcgagataccttgttcactgcagagtcaggtacaagaaggggcatcccaaaggttatcgtggttataactgatggaagatcacaagatgatgtgaacaaaatctccagggagatgcaattagatggctatagcatttttgcaattggtgtggccgatgcagattactcggagttggttagcattggcagtaagcccagcgcacgccatgtcttctttgtggatgactttgacgcctttaagaaaatcgaagatgagttaattacttttgtctgcgaaacagcatcagcaacctgtccagtggtacacaaggatggcattgatcttgcaggatttaagatgatggaaatgtttggtttggttgaaaaagatttttcatcagtggaaggggtttctatggagcctggtaccttcaatgtgtttccatgttaccaactccataaagatgccctggtttcccagccaaccaggtacttgcacccagaaggattgccctccgactacacaatcagttttctattccggattcttcctgacactccacaggagccatttgctctttgggagattttaaataaaaattctgacccattggttggggttattttagacaatggtgggaaaactctaacatatttcaactatgaccagagtggggattttcaaactgttactttcgaaggacctgaaattaggaaaattttttatggaagctttcacaagctacacattgttgtcagtgagactttggtcaaagtggttattgactgcaagcaagtgggtgagaaggcaatgaacgcatcagctaatatcacgtcagatggtgtagaagtgctagggaaaatggttcgatcaagaggaccaggtggaaactctgcaccgttccagttacagatgtttgatattgtttgctccacatcatgggccaatacagacaaatgctgtgaacttccaggcctgagagatgatgagtcttgcccagaccttccccattcctgctcctgttctgaaaccaatgaagtggctctgggaccagcgggcccaccaggtggtccaggactccgaggaccaaagggccagcaaggtgaaccgggtccaaagggaccagatggccctcggggtgaaattggtctgccaggacctcagggtccacctggacctcaaggaccaagtggtctgtccattcaaggaatgcccggaatgccaggagaaaaaggagagaaaggagatactggccttccaggtccacagggtatcccaggaggcgttggttcaccaggacgtgatggctcaccaggccagaggggccttccgggaaaggatggatcctcgggacctccaggaccaccagggccaataggcattcctggcacccctggagtcccagggatcacaggaagcatgggaccgcaaggcgccctgggaccacctggtgtccctggagcaaagggggaacgaggagagcggggtgacctgcagtctcaagccatggtgagatcagtggcgcgtcaagtatgcgaacagctcatccagagtcacatggccaggtacactgccatcctcaaccagattcccagccactcctcatccatccggactgtccaagggcctcctggggagcctgggaggccaggctcacctggagcccctggtgaacaaggacccccaggcacaccaggcttccccggaaatgcaggcgtgccagggaccccaggagaacgaggtctaactggtatcaaaggagaaaaaggaaatccaggcgttggaacccaaggtccaagaggcccccctggaccagcaggaccttcaggggagagtcggcctggcagccctgggccccctggctctcctggaccaagaggcccaccaggtcatctgggggttcctggaccccaaggtccttctggccagcctggatattgtgacccctcatcatgttctgcctatggtgtgagagctccccatccagatcagccagagttcacccctgtccaagatgagctggaagccatggaactgtggggccctggagtctgatagcctcaggagaaatttgaagaccaactgcaagaactcttaaggaatcttgtttgagaaaatgttgttatgtggtttgtatgctacttttggggggcagggctcatttcagcagcctaaatctcctccttggataatgttaatattattattattattaacaaaaaatatatatttttaaaaagttcccttaatctatgacatggtagcaatgatttccctttggtgtcttaatggcatgtcagataatttgtttttccagagaagagagctcaaagaggaattgggaaaaataaattgaactctggaatcttctctctcaagtcctaaaatgaacaaacagatatgattgtgtttgagggaaatatgtccctagcaggaaaagaattcaaagaggttcaaagaatatgtcacttactcctacttgctgtaggaataaccttgctgataagaaaaaaagggacaatattggagaaactacctcttgtttaattgatctgtccaactctgagatcacttggtaactggtttcatgtgtatccaaaaatcagcatttggatttaagctttctgaatttggtagtttaagaaacagatttagtttttcagtggttttaactcatgtgaaataatgattttccaccagctctgatgcaaagagatataattttaatgaacgatttatccagcagtgtgttccaggggttgcctctccttatctacggggattactttgtacatgcagataagttttcgcaaacctatttccattttcttttgtaagcaaataaaactttaaaacaa

SEQ ID NO: 91 - DNA, 2432 bp, Homo sapiens
atgattcactttcgagggtacccacaagagatgtgtctgctcctccagacgccgcccaatggggtgaagcgtctggccctgagtcaggatgctggggtgaacatttcggacggggccccggcggttcagacccggaggcggctcctcccggaggcagatcctcccggcgtcggccttcggtcctccccgccaaagccctcttgggacaagccggggattccccgccgccgcccgccccctggcgtcacggagtccccgcgaggccccgccccggcctggcgccgtcctgggcgggaggaacgcgccgctaggcgggagagcgcggccatggcggggccgggcgtccccggtgcccccgcagcgcgctggaaacgccacatcgtgcggcagctgcggcttcgggaccgtacgcaaaaggcgcttttcctggagctggtgccggcctataaccatctcttagagaaggctgagctgctggacaagttctcaaagaagctgcagccggagccaaacagtgtcactcccaccacccaccagggcccctgggaggagtcagagcttgactcagaccaagtcccatcactggtcgcactgagggtgaagtggcaggaggaggaggaggggctccggctggtctgtggtgagatggcctaccaggtggtggagaagggcgcggccctgggcacgctggagtcggagctgcagcagaggcaaagcaggctggcagccctggaggcccgcgtggcgcagctgcgagaggcgcgggcgcagcaggcccagcaggtggaggagtggcgggcgcagaatgcggtgcagcgggcagcctacgaggcgctgcgcgcgcacgtcgggctccgggaggcggcactgcgcaggctccaggaagaggcgcgcgacctgctggagaggctcgtgcagcgcaaggcgcgcgccgcggccgagcgcaacctgcgcaacgagcgccgggagcgggccaagcaggcgcgggtgtcccaggagctgaagaaggctgccaagcggaccgtgagcatcagcgagggcccggacaccctaggcgatgggatgagggagagaagggagactctggctctggcccctgagccagagcccctggagaaggaagcttgtgagaagtggaagaggcccttcaggtctgcctcagccacctccctgacgctgtcccactgtgtggatgtggtgaaggggcttctggattttaagaagaggagaggtcactcaattgggggagcccctgagcagcgataccagatcatccctgtgtgtgtggctgcccgacttcctacccgggctcaggatgtgctggatgcccacctctctgaggtcaatgctgttcgttttggccccaacagcagcctcctggccactggaggggctgaccgcctgatccacctctggaatgttgtgggaagtcgcctggaggccaaccagaccctggagggagctggtggcagcatcaccagtgtggactttgacccctcgggctaccaggttttagcagcaacttacaaccaggctgcccagctctggaaggtgggggaggcacagtccaaggagacactgtctggacacaaggataaggtgacagctgccaaattcaagctaacgaggcaccaggcagtgactgggagccgcgaccggacagtgaaggagtgggacctcggccgtgcctattgctccaggaccatcaatgtcctttcctactgtaatgacgtggtgtgtggggaccatatcatcattagtggccacaatgaccagaagatccggttctgggacagcagggggccccactgcacccaggtcatccctgtgcagggccgggtcacctccctgagcctcagccacgaccaactgcacctgctcagctgttcccgagacaacacactcaaggtcatcgacctgcgtgtcagcaacatccgccaggtgttcagggccgatggcttcaagtgtggttctgactggaccaaagctgtgttcagcccggacagaagctatgcactggcaggctcctgtgatggggccctttacatctgggatgtggacaccgggaaactggagagcagactacagggaccccattgcgctgccgtcaacgccgtggcctggtgctactccgggagccacatggtgagcgtggaccagggcaggaaggttgtgctctggcagtagggccacgacctgcctgcctgggctggagctcttgcccgaagcctgaagcttccttcggcgccatgcaggggttggggttgggactggagctggccttgggatttaatggggaagaaggcctggcaggacctggcctgtttgtttaaaaatgaagtatgggttgggggattacgctagtttttctttgtatttttatctctatctcctcactttttctcccaaagtagaaaaaaatgatatctgaa

SEQ ID NO: 92 - DNA, 1149 bp, Homo sapiens
atgatgttccccggcctcctcgcgccccccgccgggtaccctagcctcctgcggcccacgcccaccttgacgctgccccagtccttgcagtcggcattttccggccactccagcttcctggtggaggatctgatccgcatcagccgaccccccgcctacctgccccgcagcgtgcccaccgccagcatgtcgccgcccaggcagggggcccccacggccctcaccgacacgggggcctcggacctgggctccccgggtcccggcagccgacggggcggctctccgccgactgccttctcccctgccagcgagacgacgtttctgaagtttggagtgaacgccatcctctcctcggggcccagaacagaaacatccccagccttgctccagagcgtccctcccaagaccttcgcctttccctacttcgaagggtcttttcagcctttcatcagatcttcttatttcccagcttcctccagcgtggtgcccatccccgggaccttctcctggccgctggccgcgcgcgggaagcctcggcggggcatgctgcgtcgagcagtcttctccgacgtgcagcggaaggcgctggagaagatgttccagaagcagaagtacatcagcaagcccgaccgcaagaagctggcggccaagctgggcctgaaagactcgcaggacacagcccgaaggacagagcctgcacccgactccactccccgcccccgtgcgtcccccggagcccctgatctgacctctgcttctcccttcttctcgccggccgggacattccaggtgaaaatctggttccagaaccgacgcatgaaatggcggaactccaaggagcgcgaactcctgtctagcgggggctgtcgcgagcagaccctgcccaccaagctcaatccgcacccggacctcagcgacgtgggccagaagggccctgggaacgaagaggaggaggagggcccgggcagccccagccaccgcctggcctaccacgcgtcctccgacccccagcacctgcgggacccgcggctgccagggccgctgcccccctcgcccgcgcactcgagcagtcccgggaaaccttcggacttctcagattccgaggaggaagaggagggcgaggaacaggaggaaatcaccgtgtcctag

SEQ ID NO: 93 - DNA, 2319 bp, Homo sapiens
gtggagtttgaattgggtggcggttgactgtagagccgctctctctcactggcacagcgaggttttgctcagcccttgtctcgggaccgcagcctccgccgagcgccatggctcctaggaagggcagtagtcgggtggccaagaccaactccttacggaggcggaagctcgcctcctttctgaaagacttcgaccgtgaagtggaaatacgaatcaagcaaattgagtcagacaggcagaacctcctcaaggaggtggataacctctacaacatcgagatcctgcggctccccaaggctctgcgcgagatgaactggcttgactacttcgcccttggaggaaacaaacaggccctggaagaggcggcaacagctgacctggatatcaccgaaataaacaaactaacagcagaagctattcagacacccctgaaatctgccaaaacacgaaaggtaatacaggtagatgaaatgatagtggaagaggaagaagaagaagaaaatgaacgtaagaatcttcaaactgcaagagtcaaaaggtgtcctccatccaagaagagaactcagtccatacaaggaaaaggaaaagggaaaaggtcaagccgtgctaacactgttaccccagccgtgggccgattggaggtgtccatggtcaaaccaactccaggcctgacacccaggtttgactcaagggtcttcaagacccctggcctgcgtactccagcagcaggagagcggatttacaacatctcagggaatggcagccctcttgctgacagcaaagagatcttcctcactgtgccagtgggcggcggagagagcctgcgattattggccagtgacttgcagaggcacagtattgcccagctggatccagaggccttgggaaacattaagaagctctccaaccgtctcgcccaaatctgcagcagcatacggacccacaaatgagacaccaaagttgacaggatggacttttaatgggcacttctgggaccctgaagagacttcttcccttcaggcttattgtttgagtgtgaagttccagagcaaggagccatgttcctctaagggaattcaggaattcagacgtgctagtcccacaccagttaggtagagctgtctgttcaccctcccatcccagctgatcccagtcactgcttgctggggccatgccatggaagcttcccatcagtctcccagctgaatcctccctgctctctgagctgctgccttttgcctcctgcaactcaacatcctcttcaccctgccctgcctgcagttgagggggcgaagaagaaccctgtgttctcaggaagactgcctccaccaccgctacccagagaacctctgcatctggcatttctgctctctatgcttgagaccgggaggtttaggctcagataagtgagctctgggccatgagagggtaggtccagaaggtggggggaactgtacagatcagcagagcaggacagttggcagcagtgacctcagtagggaacatgtccgtctaccctctcgcactcatgacacctccccctaccagccctcctcttcctcctcctcctcctcctgtgggaggtggtcagtgggacttagggatctttcacctgctgtgcccagtagttctgaagtctgcttgtggagcagtgttttatgtttatccctgtttactgaagaccaaatactggtttggagacaacttccatgtcttgctcttctacctccctagttagtggaaatttggataagggaactgtagggcccagattctggaggttttatgtcattggccacagaataactgtctctaagctatccatggtccagtggtccctgccaagtctgtagacttcagagagcacttctctcttatggggttcatgggaacaggggtgggtgtgacttgcttggtggcctcattccatgtgtgcctgtgcctggggcatggactttgttaagcagagtcagcagtgaggtcctcattctccagccagcctctctgccctggagaatcatgtgctatgttctaagaatttgagaactagagtcctcatccccaggcttgaaggcacatggctttctcatgtagggctctctgtggtatttgttattattttgcaacaagaccattttagtaaaacagtcctgttcaagttgtattcttttaagttcttttattctcctttccctgagatttttgtatatattgttctgagtaatggtatctttgagctgattgttctaatcagagctggtacctactttcaataaattctggttttgtgttttcttttgtaaaaaaaaaaaaaaaaaa

SEQ ID NO: 94 - DNA, 4257 bp, Homo sapiens
atacgccggggcggggccgagagtttggagccccggagtggggtgtcggcgcctcattcgggtggagctgagccggagacaggcagttgtgaaaaacttcaggacaaaaatgtttcatttaaggacttgtgctgctaagttgaggccattgacggcttcccagactgttaagacattttcacaaaacagaccagcagcagctaggacatttcaacagattcggtgctattctgcacctgttgctgctgagccctttctcagtgggactagttcgaactatgtggaggagatgtactgtgcttggctggaaaaccccaaaagtgtacataagtcatgggacattttttttcgcaacacgaatgccggagccccaccgggcactgcctaccagagtccccttcccctgagccgaggctccctggctgctgtggcccatgcacagtccctggtagaagcacagcccaacgtggacaagctcgtggaggaccacctggcagtgcagtcgctcatcagggcatatcagatacgagggcaccatgtagcacagctggaccccctggggattttggatgctgatctggactcctccgtgcccgctgacattatctcatccacagacaaacttgggttctatggcctggatgagtctgacctcgacaaggtcttccacttgcccaccaccactttcatcgggggacaggaatcagcacttcctctgcgggagatcatccgtcggctggagatggcctactgccagcatattggggtggagttcatgttcatcaatgacctggagcagtgccagtggatccggcagaagtttgagacccctgggatcatgcagttcacaaatgaggagaaacggaccctgctggccaggcttgtgcggtccaccaggtttgaggagttcctacagcggaagtggtcctctgagaagcgctttggtctagaaggctgcgaggtactgatccctgccctcaagaccatcattgacaagtctagtgagaatggcgtggactacgtgatcatgggcatgccacacagagggcggctgaacgtgcttgcaaatgtcatcaggaaggagctggaacagatcttctgtcaattcgattcaaagctggaggcagctgatgagggctccggagatgtgaagtaccacctgggcatgtatcaccgcaggatcaatcgtgtcaccgacaggaacattaccttgtccttggtggccaacccttcccaccttgaggccgctgaccccgtggtgatgggcaagaccaaagccgaacagttttactgtggcgacactgaagggaaaaaggtcatgtccatcctgttgcatggggatgctgcatttgctggccagggcattgtgtacgagaccttccacctcagcgacctgccatcctacacaactcatggcaccgtgcacgtggtcgtcaacaaccagatcggcttcaccaccgaccctcggatggcccgctcctccccctaccccactgacgtggcccgagtggtgaatgcccccattttccacgtgaactcagatgaccccgaggctgtcatgtacgtgtgcaaagtggcggccgagtggaggagcaccttccacaaggacgtggttgtcgatttggtgtgttaccggcgcaacggccacaacgagatggatgagcccatgttcacgcagccgctcatgtacaagcagatccgcaagcagaagcctgtgttacagaagtacgctgagctgctggtgtcgcagggtgtggtcaaccagcctgagtatgaggaggaaatttccaagtatgataagatctgtgaggaagcttttgccagatctaaagatgagaagatcttgcacattaagcactggctggactctccctggcctggcttcttcaccctggacgggcagcccaggagcatgtcctgcccctccacgggtctgacggaggatattctgacacacatcgggaatgtggctagttctgtgcctgtggaaaactttactattcatggagggctgagccggatcttgaagactcgtggggaaatggtgaagaaccggactgtggactgggctctagcggagtacatggcgtttggctcgctcctgaaggagggcatccacattcggctgagcggccaggacgtggagcggggcacattcagccaccgccaccatgtgctccatgaccagaatgtggacaagagaacctgcatccccatgaaccatctctggcccaatcaggccccctatactgtgtgcaacagctcactgtctgagtacggcgtgctgggctttgagctgggcttcgccatggccagtcctaatgccctggtcctctgggaagcccaatttggtgacttccacaacacggcccagtgtatcatcgaccagttcatctgcccgggacaagccaagtgggtgcggcagaatggcatcgtgttgctgctgccccatggcatggagggcatgggtccagaacattcctccgcccgcccagagcggttcttgcagatgtgcaacgatgacccagatgtcctgccagaccttaaagaagccaacttcgacatcaatcagctatatgactgcaattgggttgttgtcaactgctccactcctggcaacttcttccacgtgctacgacgccagatcctgctgccattccggaagccgttaattatcttcacccccaaatccctgttgcgccaccccgaggccagatccagctttgatgagatgcttccaggaacccacttccagcgggtgatcccagaagatggccctgcagctcagaacccagaaaatgtcaaaaggcttctcttctgcaccggcaaagtgtattatgacctcacccgggagcgcaaagcacgcgacatggtggggcaggtggccatcacaaggattgagcagctgtcgccattcccctttgacctcctgctgaaggaggtgcagaagtaccccaatgctgagctggcctggtgccaggaggagcacaagaaccaaggctactatgactacgtgaagccaagacttcggaccaccatcagccgcgccaagcccgtctggtatgccggccgggacccagcggctgctccagccaccggcaacaagaagacccacctgacggagctgcagcgcctcctggacacggccttcgacctggacgtcttcaagaacttctcgtagatgctgcctagggttgcttgggccactgccctctccacacccatgactgccccttgcttctcaactaaagaatagtgcctcagcgctgcccacaccaccgccctcctcgctgtgccaccacccctccctctgctctcataggagttaggctgtcgtccccctccagtgcttggctgccccacaggccacacgctgcccaggctctgctgacttctgagcagttttccaggaggccggggggagcaggaggaggaaaggtagcccccgagggatgtccttggggaggggtcagctctggccacaatcctccccaccagtctcacccactaggataggaactgggccttgtgtgctggcttccgctgtcacccagcaaggcacaggctcctgtatttgagactaggatagcttcatcttgagcctgagccttagaatctgtagaggagcctggagtcggatctagccatggctggcagaggtttctagggtgggccccagccgtggcgtgaactgaggatgacccggggcagctggcaggagagagccttggcctgacctggcacagaaagggcagcttcagtctctgcagtgtccattatctgctgttccttcgagggttccaggctgtgtgtggggcccaagcatgccccacccacccctcctgggcccaggcagcacctggagcccacagagtctgtgtgtagccaggaagccccgctcaggtagccaccaccggggcactggctgctctgtcttggtcctgttaaccctccacctcctctcttggactccctccccaccccaaccactctttctttctcctttaacccaatggagactttctgatgcatcgttttctttgctgtgccaaagcaggtcagaagagggagaggaggggctgggggtgaggggccaggccatggccaaggggccagctgcccctcatttatcactctgaccttcacagggacagatctgatttatttattttggttaaaaaaaaaaaaaaggaacagaaacaactttgcattgcattggcttgacccataaactaagttatatccgtgggcaaaaaa

SEQ ID NO: 95 - DNA, 1972 bp, Homo sapiens
ctgtgtgtaggagggatttcggcctgagagcgggccgaggagattggcgacggtgtcgcccgtgttttcgttggcgggtgcctgggctggtgggaacagccgcccgaaggaagcaccatgatttcggccgcgcagttgttggatgagttaatgggccgggaccgaaacctagccccggacgagaagcgcagcaacgtgcggtgggaccacgagagcgtttgtaaatattatctctgtggtttttgtcctgcggaattgttcacaaatacacgttctgatcttggtccgtgtgaaaaaattcatgatgaaaatctacgaaaacagtatgagaagagctctcgtttcatgaaagttggctatgagagagattttttgcgatacttacagagcttacttgcagaagtagaacgtaggatcagacgaggccatgctcgtttggcattatctcaaaaccagcagtcttctggggccgctggcccaacaggcaaaaatgaagaaaaaattcaggttctaacagacaaaattgatgtacttctgcaacagattgaagaattagggtctgaaggaaaagtagaagaagcccaggggatgatgaaattagttgagcaattaaaagaagagagagaactgctaaggtccacaacgtcgacaattgaaagctttgctgcacaagaaaaacaaatggaagtttgtgaagtatgtggagcctttttaatagtaggagatgcccagtcccgggtagatgaccatttgatgggaaaacaacacatgggctatgccaaaattaaagctactgtagaagaattaaaagaaaagttaaggaaaagaaccgaagaacctgatcgtgatgagcgtctaaaaaaggagaagcaagaaagagaagaaagagaaaaagaacgggagagagaaagggaagaaagagaaaggaaaagacgaagggaagaggaagaaagagaaaaagaaagggctcgtgacagagaaagaagaaagagaagtcgttcacgaagtagacactcaagccgaacatcagacagaagatgcagcaggtctcgggaccacaaaaggtcacgaagtagagaaagaaggcggagcagaagtagagatcgacgaagaagcagaagccatgatcgatcagaaagaaaacacagatctcgaagtcgggatcgaagaagatcaaaaagccgggatcgaaagtcatataagcacaggagcaaaagtcgggacagagaacaagatagaaaatccaaggagaaagaaaagaggggatctgatgataaaaaaagtagtgtgaagtccggtagtcgagaaaagcagagtgaagacacaaacactgaatcgaaggaaagtgatactaagaatgaggtcaatgggaccagtgaagacattaaatctgaaggtgacactcagtccaattaaaactgatctgataagacctcagatcagacagaggactactgttcgaagatttttggaagaatactgagaacggcataaagtgaagatcgacatttaaaaaatgaggtgaaagaaagctatagtggcatagaaaaagtataaagctcagttagtttttttattattattattattaaaagttaattcaggactgatgtgacctaccagatttcagaacatgtgttaatagtatatatgccactgaaaacttaggtcctgtatcatacttttttctttaagactttttaagaaatattacttaaacatgtggcttgctcagtgtttaattgcaagttttcaatcttggactttgaaaacaggattaaacgttagtattcgtgtgaatcagactaagtgggatttcatttttacaactctgctctacttagcctttggatttagaagtaaaaataaagtatctctgactttctgttacaaagttgattgtctctgtcattgaaaagttttagtattaatctttttctaataaagttattgactctgaaaaaaaaaaaaa

SEQ ID NO: 96 - DNA, 3316 bp, Homo sapiens
ggaggcaggcggtgccgcggcgccgggacccgactcatccggtgcttgcgtgtggtggtgagcgcagcgccgaggatgaggaggtgcaacagcggctccgggccgccgccgtcgctgctgctgctgctgctgtggctgctcgcggttcccggcgctaacgcggccccgcggtcggcgctctattcgccttccgacccgctgacgctgctgcaggcggacacggtgcgcggcgcggtgctgggctcccgcagcgcctgggccgtggagttcttcgcctcctggtgcggccactgcatcgccttcgccccgacgtggaaggcgctggccgaagacgtcaaagcctggaggccggccctgtatctcgccgccctggactgtgctgaggagaccaacagtgcagtctgcagagacttcaacatccctggcttcccgactgtgaggttcttcaaggcctttaccaagaacggctcgggagcagtatttccagtggctggtgctgacgtgcagacactgcgggagaggctcattgacgccctggagtcccatcatgacacgtggcccccagcctgtcccccactggagcctgccaagctggaggagattgatggattctttgcgagaaataacgaagagtacctggctctgatctttgaaaagggaggctcctacctgggtagagaggtggctctggacctgtcccagcacaaaggcgtggcggtgcgcagggtgctgaacacagaggccaatgtggtgagaaagtttggtgtcaccgacttcccctcttgctacctgctgttccggaatggctctgtctcccgagtccccgtgctcatggaatccaggtccttctataccgcttacctgcagagactctctgggctcaccagggaggctgcccagaccacagttgcaccaaccactgctaacaagatagctcccactgtttggaaattggcagatcgctccaagatctacatggctgacctggaatctgcactgcactacatcctgcggatagaagtgggcaggttcccggtcctggaagggcagcgcctggtggccctgaaaaagtttgtggcagtgctggccaagtatttccctggccggcccttagtccagaacttcctgcactccgtgaatgaatggctcaagaggcagaagagaaataaaattccctacagtttctttaaaactgccctggacgacaggaaagagggtgccgttcttgccaagaaggtgaactggattggctgccaggggagtgagccgcatttccggggctttccctgctccctgtgggtcctcttccacttcttgactgtgcaggcagctcggcaaaatgtagaccactcacaggaagcagccaaggccaaggaggtcctcccagccatccgaggctacgtgcactacttcttcggctgccgagactgcgctagccacttcgagcagatggctgctgcctccatgcaccgggtggggagtcccaacgccgctgtcctctggctctggtctagccacaacagggtcaatgctcgccttgcaggtgcccccagcgaggacccccagttccccaaggtgcagtggccaccccgtgaactttgttctgcctgccacaatgaacgcctggatgtgcccgtgtgggacgtggaagccaccctcaacttcctcaaggcccacttctccccaagcaacatcatcctggacttccctgcagctgggtcagctgcccggagggatgtgcagaatgtggcagccgccccagagctggcgatgggagccctggagctggaaagccggaattcaactctggaccctgggaagcctgagatgatgaagtcccccacaaacaccaccccacatgtgccggctgagggacctgaggcaagtcgacccccgaagctgcaccctggcctcagagctgcaccaggccaggagcctcctgagcacatggcagagcttcagaggaatgagcaggagcagccgcttgggcagtggcacttgagcaagcgagacacaggggctgcattgctggctgagtccagggctgagaagaaccgcctctggggccctttggaggtcaggcgcgtgggccgcagctccaagcagctggtcgacatccctgagggccagctggaggcccgagctggacggggccgaggccagtggctgcaggtgctgggagggggcttctcttacctggacatcagcctctgtgtggggctctattccctgtccttcatgggcctgctggccatgtacacctacttccaggccaagataagggccctgaagggccatgctggccaccctgcagcctgaaccacctggggaggaggcgggagagggagctgccatctctaggcacctcaagccccctgaccccattccctcccctcccaccccttgctccttgtctggcctagaagtgtgggaaattcaggaaaacgagttgctccagtgaagcttcttggggttgctaggacagagagctcctttgacacaaaagacaggagcagggtccaggttcccctgctgtgcagggagggcagccccgggcagtgggcatagggcagctcagtccctggcctcttagcaccacattcctgtttttcagcttatttgaagtcctgcctcattctcactggagcctcagtctctcctgcttggtcttggccctcaactggggcaagtgaagccagaggagggtcccccagctgggtgggctggaatggaactcctcactagctgctggggctccgcccaccctgctcccttccggacaatgaagaagcctttgcaccctgggaggaaggaccaccccgggccctctatgcctggccagcctccagctcctcagacctcctgggtggggtttggcttcagggtggggtttggaagcttctggaagtcgtgctggtctcccaggtgaggcaagccatggttgctgggctgtagggtgagtggcttgcttggtgggacctgacgagttggtggcatgggaaggatgtgggtctctagtgccttgccctggcttagctgcaggagaagatggctgctttcacttccccccattgagctctgctccctctgagcctggtcttttgtccttttttattttggtctccaagatgaatgctcatctttggagggtgccaggtagaagctagggaggggagtgtcttctctctccaggtttcaccttccagtgtgcagaagttagaagggtctggcgggggcagtgccttacacatgcttgattcccacgctaccccctgccttgggaggtgtgtggaataaattatttttgttaaggcaa

SEQ ID NO: 97 - DNA, 2104 bp, Homo sapiens
acgtagcgcggcgctcggaactgacctactaacacacatctctccgcgcggccacggcgcccgcggacccggcgcgcccgcccgcctcccgcgccgcgccctcgccgccgcccgcctcccgccgcggccccggaggcccggcccggcccgagccccgagcgccggcggcccgactcccggccgcccctttctttctcctcgccggcccgagagcaggaacacgataacgaaggaggcccaacttcattcaataaggagcctgacggatttatcccagacggtagaacaaaaggaagaatattgatggattttaaaccagagtttttaaagagcttgagaatacggggaaattaatttgttctcctacacacatagatagggtaaggttgtttctgatgcagctgagaaaaatgcagaccgtcaaaaaggagcaggcgtctcttgatgccagtagcaatgtggacaagatgatggtccttaattctgctttaacggaagtgtcagaagactccacaacaggtgaggagctgcttctcagtgaaggaagtgtggggaagaacaaatcttctgcatgtcggaggaaacgggaattcattcctgatgaaaagaaagatgctatgtattgggaaaaaaggcggaaaaataatgaagctgccaaaagatctcgtgagaagcgtcgactgaatgacctggttttagagaacaaactaattgcactgggagaagaaaacgccactttaaaagctgagctgctttcactaaaattaaagtttggtttaattagctccacagcatatgctcaagagattcagaaactcagtaattctacagctgtgtactttcaagattaccagacttccaaatccaatgtgagttcatttgtggacgagcacgaaccctcgatggtgtcaagtagttgtatttctgtcattaaacactctccacaaagctcgctgtccgatgtttcagaagtgtcctcagtagaacacacgcaggagagctctgtgcagggaagctgcagaagtcctgaaaacaagttccagattatcaagcaagagccgatggaattagagagctacacaagggagccaagagatgaccgaggctcttacacagcgtccatctatcaaaactatatggggaattctttctctgggtactcacactctcccccactactgcaagtcaaccgatcctccagcaactccccgagaacgtcggaaactgatgatggtgtggtaggaaagtcatctgatggagaagacgagcaacaggtccccaagggccccatccattctccagttgaactcaagcatgtgcatgcaactgtggttaaagttccagaagtgaattcctctgccttgccacacaagctccggatcaaagccaaagccatgcagatcaaagtagaagcctttgataatgaatttgaggccacgcaaaaactttcctcacctattgacatgacatctaaaagacatttcgaactcgaaaagcatagtgccccaagtatggtacattcttctcttactcctttctcagtgcaagtgactaacattcaagattggtctctcaaatcggagcactggcatcaaaaagaactgagtggcaaaactcagaatagtttcaaaactggagttgttgaaatgaaagacagtggctacaaagtttctgacccagagaacttgtatttgaagcaggggatagcaaacttatctgcagaggttgtctcactcaagagacttatagccacacaaccaatctctgcttcagactctgggtaaattactactgagtaagagctgggcatttagaaagatgtcatttgcaatagagcagtccattttgtattatgctgaattttcactggacctgtgatgtcatttcactgtgatgtgcacatgttgtctgtttggtgtctttttgtgcacagattatgatgaagattagattgtgttatcactctgcctgtgtatagtcagatagtccatgcgaaggctgtatatattgaacattatttttgttgttctattataaagtgtgtaagttaccagtttcaataaaggattggtgacaaacacagaaaaaaaaaaaaaaaaaaaaa

SEQ ID NO: 98 - DNA, 4449 bp, Homo sapiens
gtaaagtggtggcacctgaccggagcatgtagccacctatgacttcctgagtggggtggtgtggggagggccctgaggagtctgtggtcctaggccttggatttcatcagggctttcctgctccttctggttgcctcagtcccaggcaagatagggtcccagaatcttacagcccagaggccacctgttgcaacttcttttttacagatggagtcatcagaacccactgtgaggaagtgacttctccttgaggtcacccagacactccaaacagagcagagcaaaagcgcctagaacttgaaattttggacctgtctccaacaccctggggatttccaccaggaagccttcagtcaccatccaggggatttttatcgccacaaagggtaattcctgctccatccctgctgtgactcagctgtgacgttgaaccacacaagccagagagaagaagataaagtcatcagagctcctactcaccagagagtgaggcccaggccaggactccacaaggctggtcccctgccctggagcaacttaaacaggccctctggccagcctggaaccctgagatggcctccagctcaggcagcagtcctcgcccggcccctgatgagaatgagtttccctttgggtgccctcccaccgtctgccaggacccaaaggagcccagggctctctgctgtgcaggctgtctctctgagaacccgaggaatggcgaggatcagatctgccccaaatgcagaggggaagacctccagtctataagcccaggaagccgtcttcgaactcaggagaaggctcaccccgaggtggctgaggctggaattgggtgcccctttgcaggtgtcggctgctccttcaagggaagcccacagtctgtgcaagagcatgaggtcacctcccagacctcccacctaaacctgctgttggggttcatgaaacagtggaaggcccggctgggctgtggcctggagtctgggcccatggccctggagcagaacctgtcagacctgcagctgcaggcagccgtggaagtggcgggggacctggaggtcgattgctaccgggcaccctgctccgagagccaggaggagctggccctgcagcacttcatgaaggagaagcttctggctgagctggaggggaagctgcgtgtgtttgagaacattgttgctgtcctcaacaaggaggtggaggcctcccacctggccctggccacctctatccaccagagccagctggaccgtgagcgcatcctgagcttggagcagagggtggtggagcttcagcagaccctggcccagaaagaccaggccctgggcaagctggagcagagcttgcgcctcatggaggaggcctccttcgatggcactttcctgtggaagatcaccaatgtcaccaggcggtgccatgagtcggcctgtggcaggaccgtcagcctcttctccccagccttctacactgccaagtatggctacaagttgtgcctgcggctgtacctgaatggagatggcactggaaagagaacccatctgtcgctcttcatcgtgatcatgagaggggagtatgatgcgctgctgccgtggcccttccggaacaaggtcaccttcatgctgctggaccagaacaaccgtgagcacgccattgacgccttccggcctgacctaagctcagcgtccttccagaggccccagagtgaaaccaacgtggccagtggatgcccactcttcttccccctcagcaaactgcagtcacccaagcacgcctacgtgaaggacgacacaatgttcctcaagtgcattgtggagaccagcacttagggtgggcggggctcctgagggagctccaactcagaagggagctagccagaggactgtgatgccctgcccttggcacccaagacctcagggcacaaagatgggtgaaggctggcatgatccaagcaagactgaggggtcgacttcgggctggccatctggttaggatggcaggacgtgggctgggcccacaaaggcaaagggtccagaaggagacaggcagagctgctcccctctgcacggaccatgcgacactgggaggccagtgagccactccggccccgaatgttgaggtggactctcaccaaatgagaagaaaatggaaccaggcttggaaccgtaggacccaagcagagaagctctcgggctaggaagatctctgcagggccgccagggagacctggacacaggcctgctctctttttctccagggtcagaaacaggaccgggtggaagggatggggtgccagtttgaatgcagtctgtccaggctcgtcattggaggtgaacaagcaaacccagacggctccactaggacttcaaattgggggttggatttgaagacttttaagtttccttccagcccagaaagtctctcattctaggcctcctggcccaggtgagtcctagagctacaggggttctggaaacattcaggagcttcctgtcctcccagctcctcactcaccttcagtaacccccactggactgacctggtccacagggcacctgccaccctgggcctggcagctcagcttccccaacacgcaggagcacacccagcccccacatcctgtgcctccatcagctaaacaccacgtcacttcatgcaggtgaaacccagtcactgtgagctcccaggtgcagccagaggcacctcaagaagaagaggggcataaactttcctcttcctgcctagaggccccacctttggtgctttccagaatcccgtaacacctgattaactgaggcatccacttctttcagcagactgatcaggacctccaagccactgagcaatgtataaccccaaagaaataatttttagaatctctttcgaagttttcctaaagtgtatggtttgggagttgtttgtactgagccaggtttgaaaaggccattgctgagtttgaggtggtgccaccagttttgcaggtggcatcagaggctggcatgctggcaggaacatcccctcttagccccagtcttctcttttctataatgagacccaccccagcttgcctccctccctggcttctctgaccctcaaaggagatgccacgcaggacagactggagagagaagcctgggcaatactgcccgcctgtcatggcctggtggtggcccacacctatcttctcaccttggaggccacacccaactttccaaagaccctgagacaagtcaggaccctactactctcccctgctgctttcctgacagcttactcttcctccacctgctgagcctgtgccagactccattgctcaaatcgttagggttgcttctataaaaatgggtcagtagcccttcctgttctctccagcccagcatacaggaggatcaaaggaggtgacggagcatcgtggcacggcagtctcaatgggtcagaaacccaggccagctgggctctaagcctggcatcctgtcatgcttagtccttcagctgaagatcagaggaagcctctcccttgccctctccagctctaggggttttcaggaggcccaactgcaataatggagcactagtgcttttatgtgcaatggtgtcgtccatgcacgacagcagcaaacattctggggctgctttttattgttcccacggctgacagcgtggcagcggagactgtggaggcagtggagactgacttcttcctgctgacagctggatgtcacacatgaaggtctggcctagcgagtgatgggtctaggccctgaaactgatgtcctagcaataacctcttgatccctactcaccgagtgttgagcccaaggggggatttgtagaacaagcccccatgagaaacagctgttactctacacttttgattgcctatttctgatggcaagagatacatactctcttcaaagagcatgagatgcagccattctttcagcaaagcttcattgacacctgcacctgttaactgtgttcgacattgaagggagaaaggcaagatgtgcactctggactcaagaaactcttagttcagtggaggaaatgagcagataagtagatcattatgattgagagtaggagaagcttagagaaagcacagaatcccagatccagctggtgaaggagggaaggcttcaggcctttaagctcagcctgagaatattgtgaaatgcagaggatggggaaaagggaagagtaccgacttgaaaacggagagctgtcttggctgagggcagggtctgtgtggcaggatgggggagggagtcagaagggtcagatgaactggagtgtagacagcatcagatgcagcagtgcccaccgccccccccccaaccccccgccctgcccacagagcacctgctggtaaccctgggcctattgaaagcaggatgagatgataatttaagacactgaatgatttcttttccaacaaagctctatgttaagtgc

SEQ ID NO: 99 - DNA, 4830 bp, Homo sapiens
caaccggttccgagtttgaggcactaggaggagggggagaagcggctgcagcggccgcggcaggagcagcgggagctacagcatcagcaagagcaacagtagctacagccccggcggcggtgcctgttccagtctttgctgctgcagtccgtgcaaccacccagagggggaggggggaaccaccagtcgctgaggaacaagagaaggggggaaagtttaggcgagccttgggggggggggggccagcgccggagccgcgtgagagagggagccgtgttttggtaggggggagtcggactgcaactggcagcagagcgtctccccggccgtgtggactctacaccccctactcctgccgcttctgctgctgcctgtggctggagggtccccctggggctgaatctttgggacttgaccccgttccctcccccttccctcactccccagccgggcgggagcatttattccccagattaattccccttttgggggggggcgggtgtgtgtgtgtgtgtgtgtgtgtgtgtgtgttgggggaagcgtccctgaaatagtaaatattattgagctctttttgcccttttcctgtccgtttttttaatttccttttttgaggtgggaaaactgaaacccaccttgattcgtcccctctcccccctccccaccttccctcgccctaatcccccaacgaggaaggaaggagcagttggttcaatctctggtaatctatgccagcaattatgacaatgttagcagaccatgcagctcgtcagctgcttgatttcagccaaaaactggatatcaacttattagataatgtggtgaattgcttataccatggagaaggagcccagcaaagaatggctcaagaagtactgacacatttaaaggagcatcctgatgcttggacaagagtcgacacaattttggaattttctcagaatatgaatacgaaatactatggactacaaattttggaaaatgtgataaaaacaaggtggaagattcttccaaggaaccagtgcgaaggaataaaaaaatacgttgttggcctcattatcaagacgtcatctgacccaacttgtgtagagaaagaaaaggtgtatatcggaaaattaaatatgatccttgttcagatactgaaacaagaatggcccaaacattggccaacttttatcagtgatattgttggagcaagtaggaccagcgaaagtctctgtcaaaataatatggtgattcttaaactcttgagtgaagaagtatttgatttctctagtggacagataacccaagtcaaatctaagcatttaaaagacagcatgtgcaatgaattctcacagatatttcaactgtgtcagtttgtaatggaaaattctcaaaatgctccacttgtacatgcaaccttggaaacattgctcagatttctgaactggattcccctgggatatatttttgagaccaaattaatcagcacattgatttataagttcctgaatgttccaatgtttcgaaatgtctctctgaagtgcctcactgagattgctggtgtgagtgtaagccaatatgaagaacaatttgtaacactatttactctgacaatgatgcaactaaagcagatgcttcctttaaataccaatattcgacttgcgtactcaaatggaaaagatgatgaacagaacttcattcaaaatctcagtttgtttctctgcacctttcttaaggaacatgatcaacttatagaaaaaagattaaatctcagggaaactcttatggaggcccttcattatatgttgttggtatctgaagtagaagaaactgaaatctttaaaatttgtcttgaatactggaatcatttggctgctgaactctatagagagagtccattctctacatctgcctctccgttgctttctggaagtcaacattttgatgttcctcccaggagacagctatatttgcccatgttattcaaggtccgtttattaatggttagtcgaatggctaaaccagaggaagtattggttgtagagaatgatcaaggagaagttgtgagagaattcatgaaggatacagattccataaatttgtataagaatatgagggaaacattggtttatcttactcatctggattatgtagatacagaaagaataatgacagagaagcttcacaatcaagtgaatggtacagagtggtcatggaaaaatttgaatacattgtgttgggcaataggctccattagtggagcaatgcatgaagaggacgaaaaacgatttcttgttactgttataaaggatctattaggattatgtgaacagaaaagaggcaaagataataaagctattattgcatcaaatatcatgtacatagtaggtcaatacccacgttttttgagagctcactggaaatttctgaagactgtagttaacaagctgttcgaattcatgcatgagacccatgatggagtccaggatatggcttgtgatactttcattaaaatagcccaaaaatgccgcaggcatttcgttcaggttcaggttggagaagtgatgccatttattgatgaaattttgaacaacattaacactattatttgtgatcttcagcctcaacaggttcatacgttttatgaagctgtggggtacatgattggtgcacaaacagatcaaacagtacaagaacacttgatagaaaagtacatgttactccctaatcaagtgtgggatagtataatccagcaggcaaccaaaaatgtggatatactgaaagatcctgaaacagtcaagcagcttggtagcattttgaaaacaaatgtgagagcctgcaaagctgttggacacccctttgtaattcagcttggaagaatttatttagatatgcttaatgtatacaagtgcctcagtgaaaatatttctgcagctatccaagctaatggtgaaatggttacaaagcaaccattgattagaagtatgcgaactgtaaaaagggaaactttaaagttaatatctggttgggtgagccgatccaatgatccacagatggtcgctgaaaattttgttccccctctgttggatgcagttctcattgattatcagagaaatgtcccagctgctagagaaccagaagtgcttagtactatggccataattgtcaacaagttagggggacatataacagctgaaatacctcaaatatttgatgctgtttttgaatgcacattgaatatgataaataaggactttgaagaatatcctgaacatagaacgaactttttcttactacttcaggctgtcaattctcattgtttcccagcattccttgctattccacctacacagtttaaacttgttttggattccatcatttgggctttcaaacatactatgaggaatgtcgcagatacgggcttacagatactttttacactcttacaaaatgttgcacaagaagaagctgcagctcagagtttttatcaaacttatttttgtgatattctccagcatatcttttctgttgtgacagacacttcacatactgctggtttaacaatgcatgcatcaattcttgcatatatgtttaatttggttgaagaaggaaaaataagtacatcattaaatcctggaaatccagttaacaaccaaatctttcttcaggaatatgtggctaatctccttaagtcggccttccctcacctacaagatgctcaagtaaagctctttgtgacagggcttttcagcttaaatcaagatattcctgctttcaaggaacatttaagagatttcctagttcaaataaaggaatttgcaggtgaagacacttctgatttgtttttggaagagagagaaatagccctacggcaggctgatgaagagaaacataaacgtcaaatgtctgtccctggcatctttaatccacatgagattccagaagaaatgtgtgattaaaatccaaattcatgctgttttttttctctgcaactcgttagcagaggaaaacagcatgtgggtatttgtcgaccaaaatgatgccaatttgtaaattaaaatgtcacctagtggccctttttcttatgtgtttttttgtataagaaattttctgtgaaatatccttccattgtttaagcttttgttttggtcatctttatttagtttgcatgaagttgaaaattaaggcatttttaaaaattttacttcatgcccatttttgtggctgggctggggggaggaggcaaattcgatttgaacatatacttgtaattctaatgcaaaattatacaatttttcctgtaaacaataccaatttttaattagggagcattttccttctagtctatttcagcctagaagaaaagataatgagtaaaacaaattgcgttgtttaaaggattatagtgctgcattgtctgaagttagcacctcttggactgaatcgtttgtctagactacatgtattacaaagtctctttggcaagattgcagcaagatcatgtgcatatcatcccattgtaaagcgacttcaaaaatatgggaacacagttagttatttttacacagttctttttgtttttgtgtgtgtgtgctgtcgcttgtcgacaacagctttttgttttcctcaatgaggagtgttgctcatttgtgagccttcattaactcgaagtgaaatggttaaaaatatttatcctgttagaataggctgcatctttttaacaactcattaaaaaacaaaacaactctggcttttgagatgacttatactaatttacattgtttaccaagctgtagtgctttaagaacactacttaaaaagcaaaataaacttggtttacattta

SEQ ID NO: 100 - DNA, 2948 bp, Homo sapiens
ccagcgcgcagctcttccgcctccgccacctgcagctgggcctggagctgcggcccgaggcgcgcgagttggccggctgcctggtgctcgagctgtgcgcgctgcggcccgcgccccgcgcgctcgtgctcgacgcgcacccggctctgcgcctgcactcagccgccttccgtcgcgcccccgccgccgccgccgagacgccctgcgccttcgccttctccgcccccgggccggggcccgcgccgccgcccccgctgcccgccttccccgaggcgcccggctccgagcccgcctgctgtccgctggccttcagggtggacccgttcaccgactacggctcctcgctcaccgtcacgctgccgcccgagctgcaggcgcaccagcccttccaggtcatcctgcggtacacctcgaccgacgcccccgccatctggtggctggacccagagctgacctatggctgcgccaagcccttcgtcttcacccagggccactccgtgtgcaaccgctccttcttcccgtgcttcgacacacctgccgtgaagtgcacctactctgccgtcgtcaaggcgccatcgggggtgcaggtgctgatgagtgccacccggagtgcatacatggaggaagaaggcgtcttccacttccacatggagcaccccgtgcccgcctacctcgtggccctggtggccggagacctcaagccggcagacatcgggcccaggagccgcgtgtgggccgagccatgcctcctgcccacggccaccagcaagctgtcgggcgcagtggagcagtggctgagtgcagctgagcggctgtatgggccctacatgtggggcaggtacgacattgtcttcctgccaccctccttccccatcgtggccatggagaacccctgcctcaccttcatcatctcctccatcctggagagcgatgagttcctggtcatcgatgtcatccacgaggtggcccacagttggttcggcaacgctgtcaccaacgccacgtgggaagagatgtggctgagcgagggcctggccacctatgcccagcgccgtatcaccaccgagacctacggtgctgccttcacctgcctggagactgccttccgcctggacgccctgcaccggcagatgaagcttctgggagaggacagcccggtcagcaaactgcaggtcaagctggagccaggagtgaatcccagccacctgatgaacctgttcacctacgagaagggctactgcttcgtgtactacctgtcccagctctgcggagacccacagcgctttgatgactttctccgagcctatgtggagaagtacaagttcaccagcgtggtggcccaggacctgctggactccttcctgagcttcttcccggagctgaaggagcagagcgtggactgccgggcagggctggaattcgagcgctggctcaatgccacaggcccgccgctggctgagccggacctgtctcagggatccagcctgacccggcccgtggaggcccttttccagctgtggaccgcagaacctctggaccaggcagctgcctcggccagcgccattgacatctccaagtggaggaccttccagacagcactcttcctggaccggctcctggatgggtccccgctgccgcaggaggtggtgatgagcctgtccaagtgctactcctccctgctggactcgatgaacgctgagatccgcatccgctggctgcagattgtggtccgcaacgactactatcctgacctccacagggtgcggcgcttcctggagagccagatgtcacgcatgtacaccatcccgctgtacgaggacctctgcaccggtgccctcaagtccttcgcgctggaggtcttctaccagacgcagggccggctgcaccccaacctgcgcagagccatccagcagatcctgtcccagggcctgggctccagcacagagcccgcctcagagcccagcacggagctgggcaaggctgaagcagacacagactcggacgcacaggccctgctgcttggggacgaggcccccagcagtgccatctctctcagggacgtcaatgtgtctgcctagccctgttggcgggctgaccctcgacctcccagacaccacaattgtgccttctgtgggccaggcctgccatgactgcgtctcggctctggccatgagctctgcccaggcccacaagcccctcccctgggctctcccaggcagggagaatggggagagggacctccttgtgtctggcagagacctgtggacctggcctccccactcccagctctcttgcactgcaggccctggggccagcccgcacacaccatgcctcctgtctcaacactgacagctgtgcctagccccggatgccagcacctgccaggtgccgccccggggcaagggccccagcagccctatggtgaccgccacactgtgccttaatgtctgccgggggcccaggctgtgctgtccctgcagcacgcctccttgcagggatctgagccaccctccccgcacagccctgcaccccgcccctagggttggcagcctcagttggcccctggcagaggaacaaggacacagacattccctcagtgtggggggcaggggacacagggagaggatggttgtccctggggagggccctctggccccaggcaaccttagcccctcagaacagggagtcccaggacccagggagagtgtggggacaggacagcctgtctcttgtagcttcctggggtgggaggcacaggggcaaagcaataccccagggaaagtgggaggtggtgctggtgctctctccaggcccaccatgctgggagaggcggccagagcctggggcctccagcctgggactgctgtgatggggtatcacggtgatggtcccattaaacttccactctgcaaaaaaaaaaaaaaaaaaaaaaaaaaaaaaaaaaaaaa

SEQ ID NO: 101 - DNA, 1678 bp, Homo sapiens
ggaagtgctttctttgcccgccgttcgccaaacgaagtcgtggaggtggcgaaacgaggaggagataacgcggccttgggctctggtgtctcccagtctgctaaagccctaaggccatcaccatggacttccagcatcgccccgggggcaagaccgggagcgggggcgtggcctcctcctccgagagcaaccgtgaccgcagggagcgcctccggcagctggccctggagaccatcgacatcaacaaggacccgtacttcatgaagaaccacctgggctcctatgaatgcaaactctgcctgacacttcacaacaatgaggggagctacctggcacatacgcaggggaagaagcaccagaccaacctggcccggcgagcagccaaggaggccaaggaggcccctgcccagcccgcgcctgagaaggtcaaggtggaggtgaagaagtttgtgaagatcggccgcccgggctacaaagtgaccaagcagagagactcggagatgggccagcagagcctcctcttccagattgactaccctgagatcgccgagggcatcatgccacgtcaccgcttcatgtctgcgtacgagcagaggatcgagcctccggaccggcgctggcagtacctgctcatggccgccgagccctacgagaccattgccttcaaggtgccgagcagagagatcgacaaggcggagggcaagttctggacacactggaaccgggagaccaagcagttcttcctccagttccactttaagatggagaagcccccggctccacccagcctccctgctggcccccctggggtgaagcggcctccacccccgctgatgaacggtctgccccctcggccaccgctgcctgagtctttgccaccgcccccgccaggaggcctgcctctgccacccatgccccccacagggcctgcgccctcagggcccccgggaccaccccagctacccccgccagctccaggggtccaccccccggccccagtggtgcatccccctgcatctggggtccatcccccagctcctggcgtccaccccccagctcctggcgtccatcccccagcccctggggtccacccaccaacctctggggtccaccccccagctcctggagtccaccctccagcccccggggttcacccaccagcccccggagtccacccaccagcccctggggttcacccaccagccccaggggtccatcctcccccatcagcgggggttcacccccaggccccgggggtgcacccagcagcccccgccgttcaccctcaggccccaggggtgcacccaccagccccagggatgcaccctcaggccccgggggtccacccccaacctcccggggtccatccgtcggctcctggggtccaccctcagcctccgggagttcacccctcaaatcctggggtgcaccccccaactcccatgcccccaatgctgaggcccccacttccctccgaaggcccagggaacatacctccccctcccccaaccaactgagaagctgctccctcccccagcaagcccagcgccaggtgctcttgccttttcccactgagagaaggctgctcttttgtactgccccccgctcattaaacagcctcccccagccctgagtgcactgatgtccgcaaaaaaaaaaaaaaaaaaaaaaaaaaaaa

SEQ ID NO: 102 - DNA, 2447 bp, Homo sapiens
gctggcctggaggctgacctggaggctcatctggaggccgagctgacccggcaggccttgcgcgggcaacatggcggcgcccggcgagcggggccgcttccacggcgggaacctcttcttcctgccggggggcgcgcgctccgagatgatggacgacctggcgaccgacgcgcggggccggggcgcggggcggagagacgcggccgcctcggcctcgacgccagcccaggcgccgacctccgattctcctgtcgccgaggacgcctcccggaggcggccgtgccgggcctgcgtcgacttcaagacgtggatgcggacgcagcagaagcgggacaccaagtttagggaggactgcccgccggatcgcgaggaactgggccgccacagctgggctgtcctccacaccctggccgcctactaccccgacctgcccaccccagaacagcagcaagacatggcccagttcatacatttattttctaagttttacccctgtgaggagtgtgctgaagacctaagaaaaaggctgtgcaggaaccacccagacacccgcacccgggcatgcttcacacagtggctgtgccacctgcacaatgaagtgaaccgcaagctgggcaagcctgacttcgactgctcaaaagtggatgagcgctggcgcgacggctggaaggatggctcctgtgactagagggtggtcagccagagctcatgggacagctagccaggcatggttggataggggcagggcactcattaaagtgcatcacagccagagcctgttgtgtctcagttgggtggtccccaggacactgcctgtggggacctgccctgcccctcttaggtttggagcagaagtggaggtgcccacagcaggtacccactggccccctcctcagtggagaccccaaggagctgcagctgaactgcaggggagggaaggaggagcagcctgggctgccccttgacattcaggatgtagcttcctgcccaccgcataccctggcgcctcactcctcacacgggaagacagcgggcctggctgggcatccctgtgcctgtccctggcggccaggccattgccttcccactatgcagccagggatgcccctgccccccatggctctgtgctgctcactttagggggctcaattctccactctgctcagtccctacagggaaagctcaggtcgggtctttctgagggtccaccagccatcctaccctctccctgcctggcacatgcctgccagcgttgtgtcatgcctgtccacaggggattcgtggggctcacttcatcagagtttgaagcccaaatgaaacgctgaagtgactgagaacctggcttcagtatattttctgctggggcttaataaagcagtagacagggcttgttccatccctctgtgctcagctgcatttcctgctggggtcctggttcctcaggagagagagaccacagggtgagagtgagccaggaacagcaaggacgttgattggttggggcaggggggccagagtagctgatgtaggagtactgggaggccagacggcacgaggtctccaaggccccagcaaagccatggcttctacccctagttcccctgacaggaagttcttggcgggtttggagccaggggatggcatggagtgatgtggctttgaagggtcctctggctgctgagctgggatgaggcaggtaagggtggaacaggaggggtggggaggaagccggggcagtcaccgagtgaccaccaagaggaagacccaccccacggcggggacagatgcggggtacgttaaagggagagccagagaactcatggggtgaggatggagtccgaggagactgctgggagccgccgtgtgggtcagagatggagaaggctgagtgcagcaaggtggggggtgactgggacccagcctttgggcctccccagccagagcagcccagcaacagtgtgtcctgtggtcataaaactccagggacctctatcctccaggagtctcagcctttccctgggcgcaggcccaccttggcatggccgcctcaggcctccatggagggagctgctatgtccccaccagattggccccgtgcggctgctggcttctgtagaggctgcccagaggggccaggtggcacaaataagagaggggagatggggggcagccaggagaggaggtgtcccttcctcgcccagacacagcgcgcttctctctggcctttcccgaggcctgtgagtgcctcaggaagcagctgggccctctgggaaggctgtgttcagcttaggaacataccgcctgtatctgctgtccctcccctgcccccctgccccccccaccgccttccctttttccctgtcttccttaaagtttcactcctgaataaaacttcactttgccttagaaaaaaaaaaaaaaaaaaaaaaaaaaaaaaaaaaaaaaaa

SEQ ID NO: 103 - DNA, 2537 bp, Homo sapiens
ggaagtcccacctgcgcccgacggcggaagttccgggagtgccaagtacccgcgtgcatacggctgccggcatggcacattacaacttcaagaaaattacggtggtgccgtccgccaaggacttcatagacctcacgttgtcgaagactcaacgaaagactccaaccgttattcataaacattaccaaatacatcgcattagacatttttacatgagaaaagtcaaatttactcaacagaattaccatgatagactttcacaaattctaacagatttccccaaattggatgatattcatccgttctatgctgatttgatgaatattctctacgacaaggatcattacaagttggctctggggcaaataaatattgccaaaaatttagtggacaatgttgctaaagattatgtgcgactgatgaagtatggcgactctctctaccgctgcaaacagctgaagcgtgcggccctgggacggatgtgcacagtgatcaagaggcagaagcagagtttggagtatttggagcaagtgcgtcagcatttatcccgtttgccaaccattgatccgaataccaggaccctgcttttgtgtgggtacccaaatgttgggaagtccagcttcatcaacaaggtgacgagagcagacgtggatgtccagccctatgcgttcacaaccaagtctctgtttgttgggcacatggattataagtatctacgttggcaggttgtagacactcctgggatcctggaccaccctctggaggataggaacaccatcgagatgcaggccatcactgccctggcccacctccgtgctgcggtcctgtatgtgatggatttgtctgagcagtgtgggcatgggctgagggagcagctagaactcttccagaacatcagacctctcttcatcaacaagcctctcatagttgtagccaacaaatgtgatgtgaagagaatagctgaactttctgaagatgatcagaaaatatttacagatttgcagtctgaaggattccctgtaatagagaccagcaccctgactgaggaaggtgttattaaagttaaaacagaggcttgcgataggcttttggctcatcgagtggaaaccaaaatgaagggaaataaagtgaatgaggtgctgaatagactgcacctggctatcccaaccaggagggacgataaggagaggccccctttcatccctgaaggagtggtggctcgcaggaagaggatggaaactgaggagtccaggaagaagagggaacgagatcttgagctggaaatgggagatgattatattttggatcttcagaagtactgggatttaatgaatttgtctgaaaaacatgataagataccagaaatctgggaaggccataatatagctgattatattgatccagccatcatgaagaaattggaagaattagaaaaagaagaagagctgagaacagctgctggagagtatgacagtgtatctgagagtgaagacgaagagatgctggaaatccgacagctggcaaagcaaattcgagagaaaaagaagttgaaaattctggagtccaaagaaaagaatacacagggacccaggatgccgcgaactgctaagaaggttcagaggacagttttggagaaggagatgcgtagtcttggtgttgacatggacgataaagacgatgcccattacgcagtccaggcaagaagatcccggagcatcactaggaaaagaaagcgggaagactctgctcccccgtcctctgtggcccggagtgggagttgctctcgaactccacgtgacgtttctggtcttagggatgtcaagatggtgaagaaagccaagactatgatgaagaatgctcagaagaagatgaatcggttggggaagaaaggggaggcggatagacacgtgtttgatatgaagcccaagcacttgctgtctgggaagaggaaagctggtaaaaaggacaggagatagtatccgtttggttggcgtggcttcgctagagtgttgctgtttatttcctggtttggcacagtatggtttcatgaaattggagctctgtataaactgaaaaagacaaaataagtaaagcacttgttgctttgctgaaaactatggttaaccctatataggtgtgggaaatttttgtcactgcataatattacaaatattttgagtagacagtgtttccacatttaatggagtatcagttgcttcagattttcagaactgggaagatttactggtgtaactgggttgtttttgatggagaaaaaccttattttcttttgtaagagctgggagcaaacacgtttatgagtgtgtcggaatcccgtgcttaaaatacgctcttaaattattttctagtcttattttacaatgtctcattgtagtctgtcttcaactattttatccaaaataaacctccagaagaaagtagttttcatttacttagctcatgttttggtttagttatagtcgctatggatttggccaaataaaaaggcaaacaacaaaaaaaaaaaaaaaaaaaaa

SEQ ID NO: 104 - DNA, 4612 bp, Homo sapiens
agaatgcactgctgacacgtgtgcgcgcgcgcggctccactgccgggcgaccgcgggaaaattccaaaaaaactcaaaaagccaatacgaggcaaagccaaattttcaagccacagatcccgggcggtggcttcctttccgccactgcccaaactgctgaagcagctcccgcgaggaccacccgatttaatgtgtgccgaccatttccttcagtgctggacaggctgctgtgaagggacatcaccttttcgctttttccaagatggctcaagattcagtagatctttcttgtgattatcagttttggatgcagaagctttctgtatgggatcaggcttccactttggaaacccagcaagacacctgtcttcacgtggctcagttccaggagttcctaaggaagatgtatgaagccttgaaagagatggattctaatacagtcattgaaagattccccacaattggtcaactgttggcaaaagcttgttggaatccttttattttagcatatgatgaaagccaaaaaattctaatatggtgcttatgttgtctaattaacaaagaaccacagaattctggacaatcaaaacttaactcctggatacagggtgtattatctcatatactttcagcactcagatttgataaagaagttgctcttttcactcaaggtcttgggtatgcacctatagattactatcctggtttgcttaaaaatatggttttatcattagcgtctgaactcagagagaatcatcttaatggatttaacactcaaaggcgaatggctcccgagcgagtggcgtccctgtcacgagtttgtgtcccacttattaccctgacagatgttgaccccctggtggaggctctcctcatctgtcatggacgtgaacctcaggaaatcctccagccagagttctttgaggctgtaaacgaggccattttgctgaagaagatttctctccccatgtcagctgtagtctgcctctggcttcggcaccttcccagccttgaaaaagcaatgctgcatctttttgaaaagctaatctccagtgagagaaattgtctgagaaggatcgaatgctttataaaagattcatcgctgcctcaagcagcctgccaccctgccatattccgggttgttgatgagatgttcaggtgtgcactcctggaaaccgatggggccctggaaatcatagccactattcaggtgtttacgcagtgctttgtagaagctctggagaaagcaagcaagcagctgcggtttgcactcaagacctactttccttacacttctccatctcttgccatggtgctgctgcaagaccctcaagatatccctcggggacactggctccagacactgaagcatatttctgaactgctcagagaagcagttgaagaccagactcatgggtcctgcggaggtccctttgagagctggttcctgttcattcacttcggaggatgggctgagatggtggcagagcaattactgatgtcggcagccgaaccccccacggccctgctgtggctcttggccttctactacggcccccgtgatgggaggcagcagagagcacagactatggtccaggtgaaggccgtgctgggccacctcctggcaatgtccagaagcagcagcctctcagcccaggacctgcagacggtagcaggacagggcacagacacagacctcagagctcctgcacaacagctgatcaggcaccttctcctcaacttcctgctctgggctcctggaggccacacgatcgcctgggatgtcatcaccctgatggctcacactgctgagataactcacgagatcattggctttcttgaccagaccttgtacagatggaatcgtcttggcattgaaagccctagatcagaaaaactggcccgagagctccttaaagagctgcgaactcaagtctagaaggcacgcaggccgtgtgggtgcccggcgtgagggatcaggctcgccagggccacaggacaggtgatgacctgtggccacgcatttgtggagtaagtgccctcgctgggctgtgagaatgagctgtacacatcttgggacaatctgctagtatctattttacaaaatgcagagccaggtccctcagcccagactcagtcagacatgttcactaatgactcaagtgagccttcggtactcctggtgcccgcccggccagaccgtcagcttgataattactaaagcaaaggcctgggtgggagaacaggtttctagtttttacccaagtcaagctgcacatctattatttaaaaattcaaagtcttagaaccaagaatttggtcatgaaccattaaagaatttagagagaacttagctctttttagactctttttaggagtcagggatctgggataaagccacactgtcttgctgtatggagaaattcttcaaggggagtcagggtccctcaggcttcccttgtgtctccctggacctgcctgacaggccacaggagcagacagcacacccaagcccgggcctccggcacactctttccactctgtatttgctaaatgatgctaactgctaccaaaaggcccttgggacatcagaggagccggcaggcgaaggtagaggatgtgttccagaaacattagaaggcaggattaattcagttagttagttctcttgttaaatggaaatgggaattggaaattcctgataaagaattggcctggctgggtgcagtggctcacacctgtgatcccagcactttgggaggccaaggcagggggattacttcagcccaggagttccagactgcctggctaacatggcaataccctatctctactaaaaatacaaaaattatcggggtgcaatggcatgcatctgtaatcccagctattcaagaggctgaggcatgaggatctcttgaacccgggaggtgggagttgtagtgagccgagatcatgacactgcactccagcctgggcaacagagcgagaccatctcttaaaaaaaggcattgttagtgtaatctcaaggttaacatttatttcatgtcagtacagggtgctttttcctttcagggacattctggaattgtattggttgtacattcttttgtgtctattctgtttgtcaagtgagtcaagacttgcttttgtccattttgatttgtgtgtattagtctgagtcttggctccgttttgaggtatgagcaaagttttgctggattagaagttaacctttagggaaattccttattttggtatgtggcaatgctaatagatccactgaagatctggaaaattccaggaacttttcacctgagcctttcttctgagaaatgctgcagtcagaagggtgtgctggtaaagtattttggtggcagctgccatcatggtcattgccttcatataacatgcttcgtgctcatggtcattgccttcatataacatgcttcgtgccatcatgatccttgccttcatataacaaacatgcttcgtcagaggtgttggggttgaaaaaggagctgcatgcttcactggagttgagggcctctctcctgttctgactttaagccagaacttgtggctgggccatggaagctgtgactcctctgtggacatggtggcagcagggaacccctagagagaggggccactgggaccaggcctcctgttgtggagggactcctgggacagtcctccaccctgtcctgtggtcctgtgtacagggttggcctcttcctcctcccctgccaggcctctgcccatgccccttccttccttctcctgggactggtgaagctaggcatctggaagacttcttcctagcctggaagccctgacctcggcccatctgcagaatctcccagttccttcacagctgccgagtcctctcacgggtgcggtggaggcggccttgccggtggtgctttctgggcagccaggggttcctgggtgggaggactgtccctctggggacgtggcactgaagtgcctgctggcttcatgtggccctttgccctttcccagcctgagagatgctcaaaggtggggagctgggggagccacccctcggccattccctccacctccaagacaggtggcggccgggcaggcactcttaagcccacctccccctcttgttgccttcgatttcggcaaagcctgggcaggtgccaccgggaaggaatggcatccgagatgctgggcggggacgcggcgtggccgagggggccttgacggcgttggcggggcctgggcacaggggcagccgcagggaggcagggatggcaaggcgtgaagccaccctggaaggaactggaccaaggtcttcagaggtgcgacagggtctggaatctgaccttactctagcaggagtttttgtagactctccctgatagtttagtttttgataaagcatgctggtaaaaccactaccctcagagagagccaaaaatacagaagaggcggagagcgcccctccaaccaggctgttattcccctggactccgtgacatctgtggaattttttagctctttaaaatctgtaatttgttgtctattttttcattctaaataaaacttcagtttgcacctaaaaaaaaaaaaaaaaaaaaaa

SEQ ID NO: 105 - DNA, 570 bp, Homo sapiens
cacctgcaccccgcccgggcatagcaccatgcctgcttgtcgcctaggcccgctagccgccgccctcctcctcagcctgctgctgttcggcttcaccctagtctcaggcacaggagcagagaagactggcgtgtgccccgagctccaggctgaccagaactgcacgcaagagtgcgtctcggacagcgaatgcgccgacaacctcaagtgctgcagcgcgggctgtgccaccttctgctctctgcccaatgataaggagggttcctgcccccaggtgaacattaactttccccagctcggcctctgtcgggaccagtgccaggtggacagccagtgtcctggccagatgaaatgctgccgcaatggctgtgggaaggtgtcctgtgtcactcccaatttctgagctccagccaccaccaggctgagcagtgaggagagaaagtttctgcctggccctgcatctggttccagcccacctgccctcccctttttcgggactctgtattccctcttgggctgaccacagcttctccctttcccaaccaataaagtaaccactttcagcaaaaa

SEQ ID NO: 106 - DNA, 6040 bp, Homo sapiens
actttccacgggtgaggcctggagaacgggtggacgtgcaggccagaacccgggacccacccggctgagcccccagactctccgctgcccacgaccctcggagtggcaccctctcctggccgtctcctctcgtgggtcccgaagaacgggtgcaaagccgagttcgtccgctgtactgcgcgggcgcgcgtttcgttcttcggttttgccacggttctgtgactccctaaaggttgagggctactgaattagaagaaacgccgagctggcttctggtgggctgccgggcgccgggcagcgtgcttggactggggagggcagggcgtgtttactctgagtagagcaaccgcaagacctcctttaaaaaataccagttctgagcttcggcattggagaggccgcctgtcattcagcctcttcggaccctctctcactccctgtcttccggagcgtgagtgaagcccgggtgaggtgttttcccacacgccgggggcccggagctgagaaggggcatggccagcatcacgcagctgttcgacgacctgtgtgaggccctcctgccggctgccaagactcacctgggccagcgcagtgtgaaccggaagagggcaaagcggagcctcaagaaggtggcctacaatgctcttttcacaaatctttttcaagatgagactcaacagctgcagcctgacatgtcaaaactaccagcgagaaacaagatcctcatgttgtcctttgacttgagagtgggtggcctgggccccaaggccgaccgtttggaggagcttgtggaggagctggaagcagccccttgctgtccgcttttggaggtggggtctgttttggacctcctggttcagctggcagggagtggtccccctcaagttctgccgagaaaacgagactacttccttaacaacaagcatgtggggagaaacgttccgtacagcggctatgattgcgacgacctgagtgtgtttgagatggacgttcagtctctgatctccagagaagagtgtttgtgtcacagcatgatccaggaaacacttcaggttatggaggctgctccaggcactggcctgcccaccgtcgggctcttctcatttggtgacccttgtggtgacaggttcgagagagacacccgggtctcgctcttcggggcccttgtgcacagccgcacttatgacatggacgtccgactgggcctgccccccgtgccagacaatgcggacctctctgggctggctattaaggtcccaccgagtgtggatcagtgggaagacgaaggattccagtcagcgtccaacttgactcctgattcccagtctgagcccagcgtgaccccagacgtggacctgtgggaagccgcacttacctatgaggccagcaagcggaggtgctgggagcgagttggctgcccccctggccacagagaggagccttacctgacggaggcgggaagggacgctttcgacaagttctgcaggctccaccaaggggagctccagctgcttgctgggggcgtcctacaggccccgcagcccgtgctggtgaaggagtgcgagctggtgaaagacgtgctgaacgtcttgattggggtcgtgtctgccacgttttcgctctgccagccggcccaggcctttgtggtgaagcggggcgtccacgtgtcaggagcgtctcccgagagcatcagcagcctgctctcggaagtggccgagtatgggacctgctacacgcgcctgagtcatttctctctgcagcccgtcctggactctttgtacagcaagggcctcgtgttccaggccttcaccagtggcctgaggaggtacctgcagtattaccgggcctgcgtcctttccactccgcccaccctgagcctcctcaccattggttttctcttcaagaaacttggccggcagctcaggtacctggccgagctctgtggcgttggcgctgtgctcccgggcacctgtggaggaggccccagggccgcgtttcccaccggcgtgaagctgctgtcctacctctaccaggaggctctgcacaactgcagcaacgagcactaccctgtactgctgtccctgctgaagaccagctgcgagccctacacccggttcatccacgactgggtgtacagcggggtgttcagagacgcttatggcgagttcatgattcaggtgaaccacgagtacctcagcttccgagataagttgtactggacacatggctacgtgctcatctccaaagaggtggaggactgtgttcccgtgtttctgaagcacattgcccacgacatatacgtctgcggaaagaccattaacctgctgaagctctgctgcccccggcattacctctgttggtccgacgtccctgtcccccggatctcggtgattttctcccttgaggagttgaaggagattgagaaggactgtgccgtctacgttgggcgcatggagagggtggcccgccacagctctgtcagcaaggaggagaaggaattacgtatggaaattgcaaaacaagaattaatcgctcatgcccgggaagcagcatccagggtcctgagtgcactgagtgaccggcagatgtcagaacggatggccttggatgcccggaagcgtgagcagtttcagaggctgaaagaacaatttgtgaaggaccaggagcgacgccaggcggccaggcaggaggagctggatgatgacttcagctacgcccgtgaactccgagacagggagagaaggctgaagtccctggaggaggagctggagaggaaggcgaggcaggcactggtcgaccactacagcaagctctctgcagaggcagctcgtcgggagcagaaggcactgtggagaatccagaggcaccgactggagagtgcacggcttcgttttctcttagaagatgagaaacacattcaggagatgctgaaagcagtgtctgaggctcaccagccccaggagccgccagacgtcctcttgagcgtgcacccccaggtcacgtctccgggccctgagcacccagagggaggccaaggctgtgattctgggtctgcagagcaacactcgcctgcctgggatggctggaacaggccaggcctgctgaccccacagccccttaagcctctagcagtgggggctggtggcagggggctgcagcaggcggagggggccagacccttctctgacagcctcagcattggagacttcctacctgtgggcccaggggctgagccgtccgtgcagactggcatggtccctctcctggaggtggcgctgcagaccattaacttggacctgcccccctcagctcctggggaggcacccgcagcagccagcactcagccctccaggccacaggagtacgactttagtactgtcctgaggccagctgtggccacctcacctgcaccagggcccctgcaggctgcagagtgcagcttgggcagctcagggctacagctgtgggaggacagttgtgggaagatggatgcctgtggctccgcctcgcgggagactctgctcccctcacacccacccaggcgtgctgctctggaggaggggagcagccagcccacagagcggctctttgggcaggtgtcagggggtggtcttcccacaggggactacgcttctgaaatagctcccacccggccacggtggaacacccacgggcacgtgtctgacgccagcatcagggtcggggagaatgtgtcagatgtggctcccacccagccacggtggaacacccacggacacgtatccaatgccagcatcagcttaggggagtctgtgtcagatgtggctcccactcggccacggtggaacatccatggacatgtgtccaacgccagcatcagggtcggggagaatgtgtcagatgtggctcccaccaggccacggtggaatacccacgggcacgtgtccaacgccagcatcagggttggggagaacgtgtcggacgtggctcccacccggccacggtggaacacccatggacacgtgtccgatgccagcatcagcttgggggagtctgtgtcagacatggctcccgcccggccacggtggaacacccatggacacgtgtctgatgccagcatcagcttgggggagtctgtgtcagacatggctcccacccggccacggtggaacacccacggacatgtgtctgacaccagcatcagggttggggagaacgtatcggacgtggctcccatccggtcacggtgcaacacccatggacacgtgtccgacgccagcatcagcttgggggagcctgtgtcggatgtggtttccacccggccacggtggaacacccatgtacccatccctccgccccacatggtgctgggggctctctcaccagaagctgagcccaacacacccaggccccaacagagcccccctggccacacgtcccagtcagcgctcagcctgggagcacagagcactgtgctggactgtgggccacggctgcctgtagaagtggggccatctctgtcctcccccagctcgggctgcggggaggggagcatcagcgtgggggagaacgtgtcagacgtggctcccacccaaccatggtggcccaacaccccgggagacagtgtctctgaagaactaggccctgggaggagcggggacactgaggacctctctccaaattggcctctcaactcacaggaagacacagctgcccagagcagcccaggccgtggtgaggaggcggaggcatcggcggcggaggctcagggtggggagcaggcctacctggcaggcctggcagggcagtaccacttggagcggtacccggacagttacgagtccatgtccgagccgcccattgctcatcttttgcgccccgtgcttccccgggccttcgccttccccgtggacccccaggtccagtctgccgctgatgagactgctgtgcagctgagcgagttgctgacgctgcccgtgctcatgaagcgctccatcacggcaccgctggccgcccacatctccttggtgaacaaggccgctgtcgactacttcttcgtggagctgcacctggaggcgcactatgaggcactgcggcacttcctgctgatggaggacggcgagttcgcccagtccctcagcgacctgctctttgagaagcttggagctgggcaaacgcccggagagctgctcaacccgctggtgctgaactctgtgctgagcaaggccctgcagtgcagcctgcatggggacaccccgcacgcctccaacctctccctcgctctcaagtacctgcccgaggtgtttgcccccaacgccccggatgtgctgagctgcctggagctcaggtacaaggtggactggcctctcaacattgtcatcaccgagggctgcctgagcaagtacagcggcgtcttctccttcctgctgcagctgaagctcatgatgtgggcgctcaaggacgtctgcttccacctcaagcgcacagccctgctgagccacatggccggctctgtgcagttccgtcagctgcagctgttcaagcacgagatgcagcatttcgtgaaggtcatccagggctacatcgccaaccagatcctgcacgtcacctggtgcgagttcagggccaggttggccaccgtgggcgacctggaggagatccagcgtgcgcacgcagagtacctgcacaaggccgtcttcaggggcctgctcacggagaaggcggcgcccgtcatgaacgtcatccacagcatcttcagcctcgtgctcaagttccgcagccagctcatctcccaggcctgggggccccctgggggcccgcggggtgcagagcaccccaactttgcactcatgcagcagtcctacaacaccttcaagtactactcccactttctcttcaaagtggtgaccaagctggtgaaccgcggctaccagccccacctggaggactttctgctgcgcatcaacttcaacaactactaccaggacgcctgaggctgctctgcgggggacgtgcacaataaaggtgttctcggaccctgaaaaaaaaaaaaaaaaaaaaa

SEQ ID NO: 107 - DNA, 4183 bp, Homo sapiens
atgtaacaggtcatgtggcagcctcctagggacacgcgtggggtctggagcgggacacgcgtgtgcagccgggccttacgtgtggctcaaggggcggtgggcgagagagacgtggacacaagtggggtggggcacgtgagggtctggggaatagaaccaggggttccatgcgccctcctccttgtctggggcgggtcttaggttggcgggagagcccagcggggacctagcgacaaggggggctggcagcctccggggctctgggccctgggagagggcggggggtgggggggattagcgttgcctgagcggcgcgtagggggtagggggagggactgagaggcgggcgggcctggagcaaacgggagccgcgctgccttcacagctcagctgggcccagcctctcctctgtctctcctcggtctcagctctgggcgagcagcggcctgtctgaagagcatgcagcccccttactccccgcctggcctcgccatccctgcccccccagcctgacccccggccccagcatggcccagggtgccatgcgcttctgctcggaaggcgactgtgccatctccccaccacgatgcccacgccgctggctccccgaaggcccggtgccccagagccccccagccagcatgtatggcagcacaggctccttgctacggcgagtggcaggtccaggtcctcgaggccgggaactgggacgtgtgacagcaccctgtacacctctgcgtggccccccctcaccccgtgttgctccctcaccctgggcaccctcttcacccactgggcagcccccacccggggcccagagctctgtggtcatcttccgctttgtggagaaggccagtgtgaggccactgaatgggctacctgctccagggggcttgagtcggagctgggatctgggtggggtttctcctcccaggcccaccccagcccttgggcctggctccaaccggaagttacggctggaagcatccacatcagacccactccccgccagaggaggctcggccctacctggcagccggaaccttgtacatgggccgccagccccaccccaggttggagcagatggcctttactcctctctccccaatgggctggggggcccccctgagcgcctggccacactcttcggaggacctgctgacactggattcctgaaccagggggatacctggtcctccccccgggaagtctcctctcatgcccagagaatcgctagagccaaatgggaattcttctatggctccttggacccccccagctcaggtgctaagcccccagagcaggcccccccatctccacctggggtgggctcaaggcagggctctggggtggctgtggggcgagcagccaagtactccgagacagacctggacacggtgcccctgaggtgctaccgcgagactgacatcgatgaggtgctggctgagcgggaggaggccgactcggccatcgaaagtcagcccagctctgagggcccaccaggcactgcctacccacctgccccacggcccggcccactccctggccctcatcccagcctcggcagtggcaatgaggatgaggacgacgatgaggcaggtggggaagaagatgtggacgacgaggtgtttgaggcctctgaaggggcccggccagggagccggatgcctctcaagtcacctgtgccctttctacctgggacgagcccctcggctgatgggcctgactctttcagttgtgtgttcgaagccatcctggagtcacaccgggccaaaggcacctcctataccagcctcgcctcgctggaggccttggcctcacctggcccaacccagagccccttcttcacctttgagctgcctccccaaccccctgcaccccggcccgacccaccagctcccgccccacttgcccctcttgaaccggattctggtaccagctctgctgctgatggtccttggacacagagaggggaggaggaggaggcagaggccagagccaagctggccccagggagggagccccctagtccctgccactcagaggacagccttgggctgggggcagcaccccttggcagcgaaccacccctgagccagctggtgtccgactcagactcagagctggacagcacagagcggctggccctgggaagcacagacaccttgtccaatgggcagaaagcggacctggaggctgcgcagcgcctggccaagaggctgtaccgactagatggcttcaggaaggccgatgtggcccggcacctgggcaagaacaatgacttcagcaaactggtggctggggagtacctcaagttctttgtcttcacgggcatgactctggaccaagctctcagggtgtttctgaaggagctggccttaatgggtgagacccaggaacgagagcgcgtgctggcccacttctcccagcgatacttccagtgcaatcctgaagccctgtcctcagaggacggcgcccacacgctgacctgtgcgctcatgctgctcaacacggatctccacggccataacatcgggaagcgcatgacctgcggggacttcatcgggaacctggagggcctcaatgatggcggcgacttccctagggagctgctcaaggccttgtacagctccatcaagaatgagaagctgcagtgggccatagacgaggaggagctgagacgctctctgtctgagttggccgaccccaaccccaaggtcatcaagcggatcagcgggggcagtggcagtggctccagccctttcctggacctgactcccgagcctggggctgccgtctacaagcacggggccctggtgcgaaaggtgcacgcagaccctgactgcaggaagacacctcggggcaagcggggctggaagagcttccacgggatcctcaagggcatgatcctctacctgcagaaggaggagtacaagcctgggaaggccctttcagagacggagctcaagaatgccatcagcatccaccatgccctggccactcgtgccagtgactacagcaagaggccccacgtcttctacctgcgcacagctgactggcgggtcttcctcttccaggccccgagcctggagcagatgcagtcctggatcactcgcatcaatgtagtagccgctatgttctctgcgccccccttcccagctgctgttagctcccaaaagaagttcagccgccctctcctgcccagcgctgccacccgcctctcccaggaggagcaggtgcggacccacgaggccaagctgaaggccatggcaagtgagctgcgggagcaccgggccgcccagctgggcaagaagggccggggcaaggaggctgaagagcagcggcagaaggaggcctacctggagtttgagaaatcccgctacagcacctatgcagcgctgcttcgggtcaagctgaaggcaggcagtgaggagctggatgcagtggaggcagcactggcccaggccgggagcacagaggatggactccctccttctcactccagtccctccctgcagcccaaaccctccagccagccccgggctcagcgtcacagctcagagcctcggccaggggcaggcagtgggcggcggaagccctgagatgaggtttagggtggggagtgcctgctgggcacctgaaggatgacatggccctgcctgagcccgggccggcctcgggccacccacgagggcctcccggcctagggcccgaccgcgccggacgcggtgtccggggcagggcagggctggggcctgggcctcaggagcctaggctaggggcacctccgagagcccctttttgtgataatgttttgcactttttcgtacagggtgggcgggggcgggaggggctagcgcccctgaacttttgatgctttttttttgtgtgggagaggcctgatgccgtttctgctttctgctgagaccacccccaccctgacaccatcagtccccctctgtcctggggcctggcttggacagagaccaggatttggggctgagctggtttcccctccttcctccccaagggcttactctttctcttgctggaggtggaggaagggcgtccatgccaaggccccatacctgggccgggggcagcacggcctggctttcccccgcttcagtgggccttgccctttgtacagcctccacccccattaaaactgctctggacttgc

SEQ ID NO: 108 - DNA, 6534 bp, Homo sapiens
actgcggggtgtgcggcggcccaagcggtttcaaacggcttagagcaggccgcttggttctgacccagctgaggaaatactcttaattctaaggaaaacctggaagcacaatgggagatgacagtgagtggttgaaactgccagttgatcagaaatgtgaacacaagctgtggaaagcaaggttaagtgggtatgaagaggccctgaagatcttccagaaaataaaggatgaaaagagcccagagtggtccaaatttttaggattgatcaaaaaatttgtcactgattccaatgcagtggttcaattgaaaggattagaagctgcacttgtttatgttgaaaatgcccatgtagcaggaaaaaccacaggagaagttgtgtcaggtgttgtaagtaaggtgttcaatcaacctaaagctaaagccaaggagctgggcatagagatctgtcttatgtacatagagattgagaaaggagaggctgttcaagaagagctcctgaaaggcttggacaataagaatcccaagatcatagtggcctgtatagagacactgaggaaagccttaagtgaatttggttccaaaatcatcttgcttaagccaattatcaaagtgttgccaaaactctttgagtctcgagagaaggctgttcgagatgaagccaaactaattgctgtggagatttacagatggattcgggatgctctgagacccccattacaaaatataaactctgttcagttgaaagaactagaagaagaatgggtcaaactgccaacaagtgctcctagacctactcgatttcttcgttcccaacaagaactagaagctaaattggaacaacaacagtctgctggtggagatgctgaaggaggtggtgatgatggtgatgaggtgccacaaatagatgcttatgagcttttagaagctgtagaaatcctttccaaacttcccaaagacttttatgacaaaattgaggcaaaaaaatggcaagagagaaaagaggccctggagtctgtagaagtactaataaaaaaccccaaactggaagctggcgattatgcagatttagtaaaagcattaaagaaggttgttggaaaggacaccaatgtcatgttggtggctttggcagcaaaatgtcttactggcctggctgttgggctaaggaagaaatttggacaatatgcaggacatgttgtgccaaccatcttggagaaattcaaagagaagaaacctcaagtggtacaagccctgcaggaggcaattgatgcaatcttccttactaccacactacagaacatcagtgaggatgttttagcagtaatggataataaaaatccaaccatcaagcagcagacatctctttttattgcaagaagtttccgccactgcactgcttctaccctgccaaagagcttgctaaagcccttttgtgctgcactacttaagcacatcaatgattctgctcctgaagtcagagatgccgcatttgaagcattgggtactgctttgaaggtggttggcgagaaagcagtaaacccattcctagctgatgtggacaaactcaagcttgataagatcaaagaatgttcagaaaaggtagaactgatacatggtaagaaagctggactagctgctgataagaaggaattcaaacctctgcctggaaggactgctgcttcaggggctgcaggagataaggacacaaaggacatttctgcacccaaaccaggacctctaaaaaaggcacctgctgctaaggctggtgggccaccaaaaaaggggaaaccagctgcaccaggaggcgcagggaatactggaaccaagaacaagaaaggactggagactaaagaaatagtggagcctgagctctcgatagaagtatgtgaagaaaaagcttcagctgttcttccccctacctgtatacagcttcttgacagcagtaactggaaagaaaggctggcttgtatggaagagttccagaaggctgttgagctaatggaccgaactgaaatgccatgccaggcattagtgaggatgctagccaagaaacctggatggaaagaaactaattttcaggtgatgcaaatgaagcttcatatagttgctttgattgcccagaagggaaatttttccaaaacgtcagctcaggttgtattagatggccttgtggacaagattggagatgtgaaatgtgggaacaatgcaaaagaagctatgacagcaatagccgaagcctgtatgttaccatggactgctgaacaggttgtgtcaatggctttctcacaaaagaatcccaaaaatcagtcagaaactctgaattggctatcaaatgccataaaagaatttggtttttctgggttgaatgtcaaagctttcattagcaatgtgaagacagctcttgctgcaacaaacccagctgtgaggactgctgccataaccctgcttggcgtgatgtatctgtatgttggtccctctttgcgaatgttctttgaggatgagaagcctgccctcctatcccagatagatgcagaatttgagaagatgcagggacaaagtccacctgctccaaccagaggaatttccaagcatagcacaagtggtacagatgaaggagaagatggagatgaaccagatgacgggagcaatgatgtcgttgatcttttgccgaggacggagatcagtgataaaatcacttcagagttggtatctaagattggtgataagaattggaagattaggaaagaaggcctagatgaagtggcaggtattattaatgacgcaaaatttatccaaccgaatataggtgaacttccaactgccttgaagggtcgactcaatgattcaaataaaatcttggtacagcaaacgctgaatatcctgcaacaactggcagtagccatgggcccaaatattaagcaacatgtaaaaaatttaggcatccctatcatcacagtccttggagacagcaagaacaatgttcgagctgctgccctagcgactgtgaatgcttgggcagaacagactggcatgaaggaatggctggaaggagaagatctttctgaagagctcaaaaaggaaaatcctttcttgaggcaagagcttctgggctggctggctgagaaactacctactcttcgttccacccctacagaccttatcctttgtgttcctcatctctactcctgcctagaagatcgaaatggagatgtgcgaaagaaggcccaagatgccttgccattcttcatgatgcatttaggatatgaaaaaatggccaaggctactgggaaactaaagccaacttctaaagatcaggtattggccatgctagagaaagccaaagttaacatgccagccaagcctgctccacccactaaagcaacttctaaaccaatgggagggtccgctccagccaaattccagcctgcatcagcacctgctgaagattgtatttccagcagtacagaacccaaacctgatccaaaaaaggccaaagctccaggattatcctctaaagcaaagagtgcacaagggaagaagatgccaagcaaaaccagcttaaaggaggatgaagacaaatccgggcctatttttattgttgttccaaatggaaaagagcaaaggatgaaagatgaaaaaggattgaaggtgctaaagtggaattttactaccccacgggatgaatacattgagcaactaaagactcaaatgtctagctgtgtggctaaatggttacaagatgagatgtttcactcagactttcagcatcataacaaagcccttgctgttatggttgatcacttggagagtgaaaaagaaggagttattggttgcctggatcttatcttaaagtggcttaccctgaggttttttgacaccaatacaagcgtcctgatgaaagcactagaatatttaaaattgctcttcaccttgctaagtgaagaagaatatcatcttactgagaatgaagcatcttccttcatcccctatcttgtcgtcaaggttggagaaccaaaggatgtcattcgtaaagatgttcgtgccatcctgaaccggatgtgccttgtctacccagctagcaagatgtttccctttatcatggaaggaaccaaatccaaaaactctaagcagagagcagagtgcctggaagagctgggatgtctggttgagtcctatggcatgaatgtttgccaaccaaccccaggaaaagccttaaaggaaatagctgttcacataggagaccgtgacaatgctgtacgcaatgctgcactcaacaccattgtaacggtgtacaatgtacatggggatcaggtgttcaaactgattggaaatctttctgaaaaggatatgagcatgctcgaggagaggattaagcggtcagcaaagagaccctctgctgcaccaataaaacaggtggaagagaaacctcagcgtgcacagaacataagctccaatgccaacatgttacgcaagggaccagctgaggacatgtcttccaaactcaaccaagcccgaagcatgagtgggcatcctgaggcagcccagatggtccgccgagaattccagctggatctagatgagattgagaatgacaatggtacagtccgatgtgaaatgccagaacttgttcagcacaaactggatgacatttttgagccagtccttattcctgaacccaagatccgggctgtttctccacacttcgatgacatgcacagtaatacagcatccacaatcaatttcattatctcccaagtagccagtggtgacatcaacacaagtatccaagctctgacacagctgtttcagatagagagccttgcccgggaggcctccactggagtactaaaagacctaatgcatggcctcatcaccttaatgctggattctcggattgaagatcttgaggaaggacaacaggtcatccgctctgtgaacctcttggtggtgaaggttctggagaagtcagaccagaccaacatcctgagtgccctacttgttttgctccaagacagcctgctagcaacagccagttctcccaaattctcagagcttgttatgaagtgtctctggagaatggttcgactgttgcctgataccatcaatagcattaacctagacagaattcttctggatatccacattttcatgaaggtcttccccaaagagaaactgaagcaatgcaaaagtgaatttcccataaggaccctaaagaccctgctacacaccttatgcaaattaaaagggcccaagatcctggaccacctaacgatgatcgacaacaaaaacgagtctgagctggaggcccatctctgccggatgatgaagcacagtatggaccagactgggagcaagtctgataaggaaacagaaaagggagcatctcgaatagatgaaaaatcatcaaaggccaaagtgaatgatttcttagctgagatttttaagaagattggctctaaagaaaacactaaagagggactagcagagttatatgaatataagaagaaatactcagatgctgacattgaaccatttctgaaaaattcctcacagttcttccagagctatgtcgaaagaggccttcgggtgattgagatggagagggagggcaaaggtcgtatttccacttcaacaggcatctcccctcagatggaagtcacatgtgtgcccacgcccacaagcacagtgtcctccataggtaacacaaatggggaagaagtggggccatctgtctacttggaaaggctaaagatcctccgacagcgatgtggtctggacaacacaaagcaagatgaccgacctcctttgacctctttgctctccaaaccagcagttcctactgtcgcctcttccacagacatgctccacagcaaactctctcagctccgggagtcacgggagcagcaccagcattcagacctggattctaaccagactcactcttcaggaactgtgacctcctcctcctccacagctaacatagacgacttgaaaaaaagactggagagaataaagagcagtcgcaaatgaagctgccccactcccccggcaccctgcagctttagtttactaaactagaagtcctcatagtttaaaatggcctcagcaggcctagtgtatacaaactggttgtatgtatcatgccgtggagctagggggaggagtcattgtggcacaagtatttgtacatactctgcttctctctgtcagcgtcctgctgctctagaagactgtccgtggatgagtttagtgtacagacttgtaaacagctgccccctctctgctcagtctagttcccagatccttttcttttctttttaattgctcatttgtaaaattgtcctaatctttcctagctttttaatagttaatattagaaactctttaatagttttcctttcagtttgtgagctcttctctgtcgccctgaagggtcactgtattctgtatgaatgcatggcatgatacaactaatttaagagtcttttataaataaagtttgcattaactatacctgacaaaaaaaaaaaaaaaa

SEQ ID NO: 109 - DNA, 3864 bp, Homo sapiens
atgcaaccagacatgtccttgaatgtcattaagatgaaatccagtgacttcctggagagtgcagaactggacagcggaggctttgggaaggtgtctctgtgtttccacagaacccagggactcatgatcatgaaaacagtgtacaaggggcccaactgcattgagcacaacgaggccctcttggaggaggcgaagatgatgaacagactgagacacagccgggtggtgaagctcctgggcgtcatcatagaggaagggaagtactccctggtgatggagtacatggagaagggcaacctgatgcacgtgctgaaagccgagatgagtactccgctttctgtaaaaggaaggataattttggaaatcattgaaggaatgtgctacttacatggaaaaggcgtgatacacaaggacctgaagcctgaaaatatccttgttgataatgacttccacattaagatcgcagacctcggccttgcctcctttaagatgtggagcaaactgaataatgaagagcacaatgagctgagggaagtggacggcaccgctaagaagaatggcggcaccctctactacatggcgcccgagcacctgaatgacgtcaacgcaaagcccacagagaagtcggatgtgtacagctttgctgtagtactctgggcgatatttgcaaataaggagccatatgaaaatgctatctgtgagcagcagttgataatgtgcataaaatctgggaacaggccagatgtggatgacatcactgagtactgcccaagagaaattatcagtctcatgaagctctgctgggaagcgaatccggaagctcggccgacatttcctggcattgaagaaaaatttaggcctttttatttaagtcaattagaagaaagtgtagaagaggacgtgaagagtttaaagaaagagtattcaaacgaaaatgcagttgtgaagagaatgcagtctcttcaacttgattgtgtggcagtaccttcaagccggtcaaattcagccacagaacagcctggttcactgcacagttcccagggacttgggatgggtcctgtggaggagtcctggtttgctccttccctggagcacccacaagaagagaatgagcccagcctgcagagtaaactccaagacgaagccaactaccatctttatggcagccgcatggacaggcagacgaaacagcagcccagacagaatgtggcttacaacagagaggaggaaaggagacgcagggtctcccatgacccttttgcacagcaaagaccttacgagaattttcagaatacagagggaaaaggcactgcttattccagtgcagccagtcatggtaatgcagtgcaccagccctcagggctcaccagccaacctcaagtactgtatcagaacaatggattatatagctcacatggctttggaacaagaccactggatccaggaacagcaggtcccagagtttggtacaggccaattccaagtcatatgcctagtctgcataatatcccagtgcctgagaccaactatctaggaaatacacccaccatgccattcagctccttgccaccaacagatgaatctataaaatataccatatacaatagtactggcattcagattggagcctacaattatatggagattggtgggacgagttcatcactactagacagcacaaatacgaacttcaaagaagagccagctgctaagtaccaagctatctttgataataccactagtctgacggataaacacctggacccaatcagggaaaatctgggaaagcactggaaaaactgtgcccgtaaactgggcttcacacagtctcagattgatgaaattgaccatgactatgagcgagatggactgaaagaaaaggtttaccagatgctccaaaagtgggtgatgagggaaggcataaagggagccacggtggggaagctggcccaggcgctccaccagtgttccaggatcgaccttctgagcagcttgatttacgtcagccagaactaaccctggatgggctacggcagctgaagtggacgcctcacttagtggataaccccagaaagttggctgcctcagagcattcagaattctgtcctcactgataggggttctgtgtctgcagaaattttgtttcctgtacttcatagctggagaatggggaaagaaatctgcagcaaaggggtctcactctgttgccaggctggtctcaaacttctggactcaagtgatcctcccgcctcggccttccaaagtgctgggatatcaggcactgagccactgcgcccagccaacaatccgctctgaggaaagcgtaagcaggaagacctcttaatggcatagcaccaataaaaaaatgactcctagttgtgtttggaaagggagagaagagatgtctgaggaaggtcatgttctttcagcttatggcatttcctagagttttgttgaagcaagaagaaaaactcagagaatataaaatcaacttttaaaattgtgtgctctcttcttcacgtaggctcctgttaaaaacaaagtgcagtcagattctaagccctgttcagagacttcgtggatcacagctgcagctcaccgccacatcacaggatccgttaacgttaatacccaatactctgtcagccactgtaggctctaagaaccacgtgcagtcttcagcccattaaattatcgattattttttaatgaattgaatttatattgagtcttcaaattaactgaatggatttaaaggggtaccaaggaggggggaaacatcagaatttcccaggcagttgttgcaaggaattggtactaaccgtgactacaacaaaaattcttgattgacttttaaagttatttcctggcattctggtaccttcacccagcctgagtgccctggagagggaacaggaaatgctgatctctacccctgggtgagaccagaacctcagggctgatactgttgagtggcttcctcggtttactctgtgtactgtgaaagtattttcatattttttctgtgtgccagagtgaaaaaggacagcttctgagtgtggtaattgtgcctctagcacccagcctttcaaagcccacctgaaacctgggggtggatgaaagaactagaatagaagactgaagctgggtaggccgctcagtgtccactggcattttgctaaaccgacaaggaaggctgtgtgcttagctctccccagagggagggcgagaagggtgtggtgatggtcaatctggctgtcggaacagattctggtgtcttgggctgataacagtgttgttgattctgattgtgaatcccctcaactctagcagacacatacacacccctgaaatggggctgcagagcaggctgtctcagccttgccactgtcggcatctcggcctgggtaattctgttgtggggactgtcctgttccttgtaggatgtttagtagcatccctgcccccacctactagatgccaggggcactgttctccccagccccccgccccagttgtgacaatagtctctaaacattgtcaaatggtccaaggaaaggggaaaattgccccggttgagaagagcactgctgtaaagtaatgagcctcggctctcctgtctgcacctgtccggttactacttggccaccacgcagccttggctcctacagcccaaaagggagaatggagggaggctccaggctttgctggaggggcctgggtgagttctgtttgctccttgtaccaccatccaaatggtgttatcaaatctcttagattccaaagaggttgaataattaatgttcaaaggcaagagggcaaggcattttttaacactttttaaaataaaaatttataccacaa

SEQ ID NO: 110 - DNA, 1710 bp, Homo sapiens
cagcagggctcccgcgggcgtcactccggccatcgtccccacctccacctgggccgcccggcaggcaggcgacggaggcccgggagccatgggtgactggggcttcctggagaagttgctggaccaggtccaggagcactcgaccgtggtgggtaagatctggctgacggtgctcttcatcttccgcatcctcatcctgggcctggccggcgagtcagtgtggggtgacgagcaatcagatttcgagtgtaacacggcccagccaggctgcaccaacgtctgctatgaccaggccttccccatctcccacatccgctactgggtgctgcagttcctcttcgtcagcacacccaccctggtctacctgggccatgtcatttacctgtctcggcgagaagagcggctgcggcagaaggagggggagctgcgggcactgccggccaaggacccacaggtggagcgggcgctggcggccgtagagcgtcagatggccaagatctcggtggcagaagatggtcgcctgcgcatccgcggagcactgatgggcacctatgtcgccagtgtgctctgcaagagtgtgctagaggcaggcttcctctatggccagtggcgcctgtacggctggaccatggagcccgtgtttgtgtgccagcgagcaccctgcccctacctcgtggactgctttgtctctcgccccacggagaagaccatcttcatcatcttcatgttggtggttggactcatctccctggtgcttaacctgctggagttggtgcacctgctgtgtcgctgcctcagccgggggatgagggcacggcaaggccaagacgcacccccgacccagggcacctcctcagacccttacacggaccaggtcttcttctacctccccgtgggccaggggccctcatccccaccatgccccacctacaatgggctctcatccagtgagcagaactgggccaacctgaccacagaggagaggctggcgtcttccaggccccctctcttcctggacccaccccctcagaatggccaaaaacccccaagtcgtcccagcagctctgcttctaagaagcagtatgtatagaggcctgtggcttatgtcacccaacagaggggtcctgagaagtctggctgcctgggatgccccctgccccctcctggaaggctctgcagagatgactgggctggggaagcaggtgcttgctggccatggagcctcattgcaagttgttcttgaacacctgaggccttcctggtgcccaccaggcactacggcttcctctccagaatgtggctttgcctgagcacagacagagtcagcatggaatgctcttggccaagggtactgggggccctctggccttttgcagctgatccagaggaacccagagccaacttaccccaacctcaccctatggaacagtcacctgtgcgcaggttgtcctcaaaccctctcctcacaggaaaaggcggattgaggctgctgggtcagccttgatcgcacagacagagcttgtgccggatttggccctgtcaaggggactggtgccttgttttcatcactccttcctagttctactgttcaagcttctgaaataaacaggacttgatcacaaaaaaaaaaaaaaaaaaaaaaaaaaaaaaaaaaaaaaaaaaaaaaaaaaaaaaaaaaaaaaaaaaaaaaaaaaaaaaaaaaaaaaaaaa

SEQ ID NO: 111 - DNA, 1579 bp, Homo sapiens
gaggaggtgcttgccagacactgggtcatggcagtggtcggtgaagctgcagttgcctagggcagggatggagagagagtctgggcatgaggagagggtctcgggatgtttggctggactagattttacagaaagccttatccaggcttttaaaattactctttccagacttcatctgagactccttcttcagccaacattccttagccctgaatacatttcctatcctcatctttcccttcttttttttcctttcttttacatgtttaaatttaaaccattcttcgtgaccccttttcttgggagattcatggcaagaacgagaagaatgatggtgcttgttaggggatgtcctgtctctctgaactttggggtcctatgcattaaataattttcctgacgagctcaagtgctccctctggtctacaatccctggcggctggccttcatcccttgggcaagcattgcatacagctcatggccctccctctaccataccctccacccccgttcgcctaagctcccttctccgggaatttcatcatttcctagaacagccagaacatttgtggtctatttctctgttagtgtttaaccaaccatctgttctaaaagaagggctgaactgatggaaggaatgctgttagcctgagactcaggaagacaacttctgcagggtcactccctggcttctggaggaaagagaaggagggcagtgctccagtggtacagaagtgagacataatggaatcaggcttcacctccaaggacacctatctaagccattttaaccctcgggattacctagaaaaatattacaagtttggttctaggcactctgcagaaagccagattcttaagcaccttctgaaaaatcttttcaagatattctgcctagacggtgtgaagggagacctgctgattgacatcggctctggccccactatctatcagctcctctctgcttgtgaatcctttaaggagatcgtcgtcactgactactcagaccagaacctgcaggagctggagaagtggctgaagaaagagccagaggcctttgactggtccccagtggtgacctatgtgtgtgatcttgaagggaacagagtcaagggtccagagaaggaggagaagttgagacaggcggtcaagcaggtgctgaagtgtgatgtgactcagagccagccactgggggccgtccccttacccccggctgactgcgtgctcagcacactgtgtctggatgccgcctgcccagacctccccacctactgcagggcgctcaggaacctcggcagcctactgaagccagggggcttcctggtgatcatggatgcgctcaagagcagctactacatgattggtgagcagaagttctccagcctccccctgggccgggaggcagtagaggctgctgtgaaagaggctggctacacaatcgaatggtttgaggtgatctcgcaaagttattcttccaccatggccaacaacgaaggacttttctccctggtggcgaggaagctgagcagacccctgtgatgcctgtgacctcaattaaagcaattcctttgacctgtca

SEQ ID NO: 112 - DNA, 2417 bp, Homo sapiens
gcagcagagaggagttgagggcgatgagagcgggtactgcgaactgccgggcgatgctgtcgctgccgccgtgatacggagagcaacagttccccagcaacacccctccccgacacaggcacacaccccccgacaggcacgcacacccaccccacagtgcccggctcggctgcgcctcctctattggcccaggaagcccacccagccccgccacgcagagcccagaaggaaagaaagcctcatgcctgagccgaggggagcaccatggatctgacaaaaatgggcatgatccagctgcagaaccctagccaccccacggggctactgtgcaaggccaaccagatgcggctggccgggactttgtgcgatgtggtcatcatggtggacagccaggagttccacgcccaccggacggtgctggcctgcaccagcaagatgtttgagatcctcttccaccgcaatagtcaacactatactttggacttcctctcgccaaagaccttccagcagattctggagtatgcatatacagccacgctgcaagccaaggcggaggacctggatgacctgctgtatgcggccgagatcctggagatcgagtacctggaggaacagtgcctgaagatgctggagaccatccaggcctcagacgacaatgacacggaggccaccatggccgatggcggggccgaggaagaagaggaccgcaaggctcggtacctcaagaacatcttcatctcgaagcattccagcgaggagagtgggtatgccagtgtggctggacagagcctccctgggcccatggtggaccagagcccttcagtctccacttcatttggtctttcagccatgagtcccaccaaggctgcagtggacagtttgatgaccataggacagtctctcctgcagggaactcttcagccacctgcagggcccgaggagccaactctggctgggggtgggcggcaccctggggtggctgaggtgaagacggagatgatgcaggtggatgaggtgcccagccaggacagccctggggcagccgagtccagcatctcaggagggatgggggacaaggttgaggaaagaggcaaagaggggcctgggaccccgactcgaagcagcgtcatcaccagtgctagggagctacactatgggcgagaggagagtgccgagcaggtgccacccccagctgaggctggccaggcccccactggccgacctgagcacccagcacccccgcctgagaagcatctgggcatctactccgtgttgcccaaccacaaggctgacgctgtattgagcatgccgtcttccgtgacctctggcctccacgtgcagcctgccctggctgtctccatggacttcagcacctatggggggctgctgccccagggcttcatccagagggagctgttcagcaagctgggggagctggctgtgggcatgaagtcagagagccggaccatcggagagcagtgcagcgtgtgtggggtcgagcttcctgataacgaggctgtggagcagcacaggaagctgcacagtgggatgaagacgtacgggtgcgagctctgcgggaagcggttcctggatagtttgcggctgagaatgcacttactggctcattcagcgggtgccaaagcctttgtctgtgatcagtgcggtgcacagttttcgaaggaggatgccctggagacacacaggcagacccatactggcactgacatggccgtcttctgtctgctgtgtgggaagcgcttccaggcgcagagcgcactgcagcagcacatggaggtccacgcgggcgtgcgcagctacatctgcagtgagtgcaaccgcaccttccccagccacacggctctcaaacgccacctgcgctcacatacaggcgaccacccctacgagtgtgagttctgtggcagctgcttccgggatgagagcacactcaagagccacaaacgcatccacacgggtgagaaaccctacgagtgcaatggctgtggcaagaagttcagcctcaagcatcagctggagacgcactatagggtgcacacaggtgagaagccctttgagtgtaagctctgccaccagcgctcccgggactactcggccatgatcaagcacctgagaacgcacaacggcgcctcgccctaccagtgcaccatctgcacagagtactgccccagcctctcctccatgcagaagcacatgaagggccacaagcccgaggagatcccgcccgactggaggatagagaagacgtacctctacctgtgctatgtgtgaagggaggcccgcggcggtggagccgagcggggagccaggaaagaagagttggagtgagatgaaggaaggactatgacaaataaaaaaggaaaagaaaaaaaaaaacagaaggaaaaggaaaaaaaaaaaaa

SEQ ID NO: 113 - DNA, 1526 bp, Homo sapiens
ccggaagtgacgcgaggctctgcggagaccaggagtcagactgtaggacgacctcgggtcccacgtgtccccggtactcgccggccggagcccccggcttcccggggccgggggaccttagcggcacccacacacagcctactttccaagcggagccatgtctggtaacggcaatgcggctgcaacggcggaagaaaacagcccaaagatgagagtgattcgcgtgggtacccgcaagagccagcttgctcgcatacagacggacagtgtggtggcaacattgaaagcctcgtaccctggcctgcagtttgaaatcattgctatgtccaccacaggggacaagattcttgatactgcactctctaagattggagagaaaagcctgtttaccaaggagcttgaacatgccctggagaagaatgaagtggacctggttgttcactccttgaaggacctgcccactgtgcttcctcctggcttcaccatcggagccatctgcaagcgggaaaaccctcatgatgctgttgtctttcacccaaaatttgttgggaagaccctagaaaccctgccagagaagagtgtggtgggaaccagctccctgcgaagagcagcccagctgcagagaaagttcccgcatctggagttcaggagtattcggggaaacctcaacacccggcttcggaagctggacgagcagcaggagttcagtgccatcatcctggcaacagctggcctgcagcgcatgggctggcacaaccgggtggggcagatcctgcaccctgaggaatgcatgtatgctgtgggccagggggccttgggcgtggaagtgcgagccaaggaccaggacatcttggatctggtgggtgtgctgcacgatcccgagactctgcttcgctgcatcgctgaaagggccttcctgaggcacctggaaggaggctgcagtgtgccagtagccgtgcatacagctatgaaggatgggcaactgtacctgactggaggagtctggagtctagacggctcagatagcatacaagagaccatgcaggctaccatccatgtccctgcccagcatgaagatggccctgaggatgacccacagttggtaggcatcactgctcgtaacattccacgagggccccagttggctgcccagaacttgggcatcagcctggccaacttgttgctgagcaaaggagccaaaaacatcctggatgttgcacggcagcttaacgatgcccattaactggtttgtggggcacagatgcctgggttgctgctgtccagtgcctacatcccgggcctcagtgccccattctcactgctatctggggagtgattaccccgggagactgaactgcagggttcaagccttccagggatttgcctcaccttggggccttgatgactgccttgcctcctcagtatgtgggggcttcatctctttagagaagtccaagcaacagcctttgaatgtaaccaatcctactaataaaccagttctgaaggtgtaaaaaaaaaaaaaaaaa

SEQ ID NO: 114 - DNA, 3895 bp, Homo sapiens
ctaggcctgggactcctgggtccccggcagtgtctggaggcatggctggggctggcgggggcctcggggtctgggggaacctggtgctgctgggcctgtgcagctggacaggggccagggcgcctgcccccaacccagggaggaacctgacagtggagactcagaccaccagctccatctccctgagctgggaggtccccgatggcctagactcacagaactccaactactgggttcagtgtactggagacggcggcacaacagagactcgaaacacaacagccaccaacgtcaccgtggatggccttggacccgggtcattgtatacgtgttctgtgtgggtggagaaagacggagtaaatagctctgtggggactgtcactactgccacagctcccaacccagtgaggaacctgagagtggaggctcagaccaacagctccatcgccctgacctgggaggtccccgacggcccagacccacagaactccacctacggggttgagtacactggagatggtggcagagcagggactcgaagcacagcacacactaacatcaccgtggatggacttgaacccgggtgtttgtatgcgttttccatgtgggtgggaaagaatggaatcaacagctcccgggagactcgaaatgccaccacagctcacaacccagtgaggaacctgagagtggaggctcagaccaccagctccatctccctgagctgggaggtccccgatggcacagacccacagaactcgacctactgcgttcagtgcactggagatggtggcagaacagagactcgaaacacaacagacaccagagtcaccgtggatggccttggacccgggtcattgtatacgtgttctgtgtgggtggagaaagacggagtaaatagctctgtggagattgtcactagtgccacagctcccaacccagtgagaaacctgacagtggaggctcagaccaacagctccatcgccctgacctgggaggtccccgatggcccagacccacagaactccacctacggggttgagtacactggagatggtggcagagcagggactcgaagcacagcacacaccaacatcaccgtggatagacttgaacccgggtgtttgtatgtgttttccgtgtgggtggggaagaatggaatcaacagctcccgggagactcgaaatgccaccacagcccccaacccagtgagaaacctccatatggagactcagaccaacagctccatcgccctatgctgggaagtccccgatggcccataccctcaggactacacctactgggtagagtacactggagacggtggtggcacagagacccgaaacacaacaaataccagtgtgacagctgagagacttgagcccggaaccttgtacacattctctgtatgggcagaaaaaaatggagcacgtggctccaggcagaatgtcagcatctccacagtccccaacgcagtgacaagcctcagcaagcaggactggaccaacagcaccattgctttgcgctggacagctccccagggcccaggccagtcttcctacagctactgggtctcatgggtcagggaaggcatgactgaccccaggacccaaagcacctcaggtactgacatcaccctaaaggaactggaagctggcagcctgtaccacctcaccgtctgggccgagaggaatgaggtcagaggctataacagcaccctcactgcagccactgctcccaatgaggtcacagatctccagaatgaaactcagactaagaactcagtcatgctgtggtggaaggcccctggagacccccactctcagttgtacgtatactgggtccagtgggccagcaagggacatccccggagggggcaagatccccaagcgaattgggtcaaccagaccagcaggaccaatgagacgtggtacaaagtggaggccctggaacccgggacgttgtacaatttcaccgtgtgggcagagaggaatgacgtagccagttccacgcagagcctctgtgcgtccacatacccagacacagtcaccatcacttcctgtgtcagcacctcagcgggctatggagtcaacttgatctggtcctgcccccagggaggctacgaggcctttgagttggaggtgggaggacagcggggctcccaggacagatcttcatgtggggaggctgtgtctgtgttgggtctcgggccggctcggtcctacccagccaccatcacgaccatctgggacggaatgaaggtcgtgtctcactctgtggtctgccacaccgagagtgcaggggtcattgccggagcctttgtgggcatcctcctgtttctcatcctcgtgggcctgctgattttcttcctgaagaggaggaataagaagaagcagcagaaaccagaactcagggatctggtctttagctccccaggggacatcccagctgaagacttcgctgaccacgtcaggaagaatgagagggacagcaactgtggttttgcagacgagtaccagcaactctccctggtgggccacagccagtctcagatggtggcttcggcttcagagaacaacgccaagaaccgctacagaaatgtgctgccctatgactggtcccgggtgcccctgaagcccatccatgaggagccaggctctgactacatcaatgccagcttcatgcccggtctctggagcccccaggagttcattgcaacccagggtcccctgccacagacagtgggtgacttctggcgcctggtgtgggaacagcagagccacaccctggtcatgctgaccaactgcatggaggccggccgggtgaagtgtgagcattactggcctctggactcgcagccctgcacccatgggcacctgcgggtaaccctggtaggtgaggaagtgatggagaactggacggtgcgggaactgctgctcctccaggtggaggagcagaagacactgtctgtgcgccaattccactaccaggcctggccggatcacggcgttccctcctccccagacaccttgctggctttctggaggatgcttcggcagtggctggatcagaccatggagggaggcccacccattgtgcactgcagtgctggcgtgggtcgcacaggaaccctcattgccctggacgtcctgctccggcagctgcagtccgagggtctccttgggcccttcagctttgtaaggaagatgagagagagtcggccgttgatggtgcagactgaggctcagtacgtattcctgcatcagtgcatcctgcggttcctccaacagtcagcccaggccccagccgagaaggaagtcccgtatgaggatgtcgaaaacctcatctacgagaacgtggccgccatccaggcccacaagttggaggtctaagtgacgagggggctgggtcggcagcccaggcatcctcaagctctggacacccacttgagcccagattcctggaagagcagagggctgggctcccagactcctgggtgctgtgggaggagggggctggtatcccaaactctggtttccccaggagagagtggtctggtgggcttcagatgagtcctatgggagctggggatctggattcctggttccctgaaggaggagagggatgatagcttggattccctaggtctttccaggatgcagaaagaaacaggctggggcctggattctgaggcaggaaggaatttgggtctggagttctggctacttgaggaccaaaggcaggaaggatcctgccttgattttacttcagaaaccaaatcagtcttctataatctggggtcggagggagtccctgtgcccaaggtctctctgcaccccaccatccacatgtatttttccttctatcccataatttattaaatcactgttctccccag

SEQ ID NO: 115 - DNA, 3230 bp, Homo sapiens
agcagtgttctcttcgtccccctcccccaaactgaggattgggcaataccacagaacctcaggaaaggggggaagagcgagcttcggccccactaatgggggagtgggcggaggctggatttcccacctcggctgcacctgggcactggaggctgaagaggaaagtgagaatctgaagttttgagacctctgactggccaggaatagctcctggggcggggggcaaggatgggaccataggcggaaagagtctcgcggtcccccctgcttctggcgcgggtccctgcgcccggttgtggagcgtctcgcgcggggagggggcggggggaacggcagctcgcggtgttgttcactcgcgcgtcgagcacacggtgggtccggcggcgggttggcgccccaggcggcgttccctgtggcctggcgcctgggccgctgccctgagcgggttccgccccagagcccgaccctcctgggggctctaggcggagtcccgcgagccgagggggaccggcgaccgctgccgaagcatgaagaaggggtaaggcgtgagcccccaagatttcacgcatgccccctagcttcggtactctgacaccttctcttgcacttgcggatgatgaactggaataacgatgaaagaaagcacatccgatctcaacattcacgtcctgccctataaccgattaattaattgatccccagctagactagtgttggagaaatcagcatgttaaaacaactgttgatgatagctgttggagtaaagttgcagtggaagctatggctgcaaaatcgttaaaatcttcaaggtgaactggcacaaaggttaatctcaagatgccgctagtgaaaagaaacatcgatcctaggcacttgtgccacacagcactgcctagaggcattaagaatgaactggaatgtgtaaccaatatttccttggcaaatataattagacaactaagtagcctaagtaaatatgctgaagatatatttggagaattattcaatgaagcacatagtttttccttcagagtcaactcattgcaagaacgtgtggaccgtttatctgttagtgttacacagcttgatccaaaggaagaagaattgtctttgcaagatataacaatgaggaaagctttccgaagttctacaattcaagaccagcagcttttcgatcgcaagactttgcctattccattacaggagacgtacgatgtttgtgaacagcctccacctctcaatatactcactccttatagagatgatggtaaagaaggtctgaagttttataccaatccttcgtatttctttgatctatggaaagaaaaaatgttgcaagatacagaggataagaggaaggaaaagaggaagcagaagcagaaaaatctagatcgtcctcatgaaccagaaaaagtgccaagagcacctcatgacaggcggcgagaatggcagaagctggcccaaggtccagagctggctgaagatgatgctaatctcttacataagcatattgaagttgctaatggcccagcctctcattttgaaacaagacctcagacatacgtggatcatatggatggatcttactcactttctgccttgccatttagtcagatgagtgagcttctgactagagctgaggaaagggtattagtcagaccacatgaaccacctccacctccaccaatgcatggagcaggagatgcaaaaccgatacccacctgtatcagttctgctacaggtttgatagaaaatcgccctcagtcaccagctacaggcagaacacctgtgtttgtgagccccactcccccacctcctccaccacctcttccatctgccttgtcaacttcctcattaagagcttcaatgacttcaactcctccccctccagtacctcccccacctccacctccagccactgctttgcaagctccagcagtaccaccacctccagctcctcttcagattgcccctggagttcttcacccagctcctcctccaattgcacctcctctagtacagccctctccaccagtagctagagctgccccagtatgtgagactgtaccagttcatccactcccacaaggtgaagttcaggggctgcctccacccccaccaccgcctcctctgcctccacctggcattcgaccatcatcacctgtcacagttacagctcttgctcatcctccctctgggctacatccaactccatctactgccccaggtccccatgttccattaatgcctccatctcctccatcacaagttatacctgcttctgagccaaagcgccatccatcaaccctacctgtaatcagtgatgccaggagtgtgctactggaagcaatacgaaaaggtattcagctacgcaaagtagaagagcagcgtgaacaggaagctaagcatgaacgcattgaaaacgatgttgccaccatcctgtctcgccgtattgctgttgaatatagtgattcggaagatgattcagaatttgatgaagtagattggttggagtaagaaaaatgcattgataaatattacaaaactgaatgcaaatgtcctttgtggtgcttgttccttgaaaatgtttggtcattctagtgttttgctttcttttccttataataaatgacccttttcctccataacttttgatttctaaggaaaatattagcatacatttcaaactaaatgttttacagtggcttatcttttttttccccctgaaaagactaatttggtcaaataaaccactaagtattaagcatggacagctgttgttagagtagcagattcagttttttgatatatcttaattgtgtactttgtgaattttaatttaaagaaagcaactgaaattgaaatcttgagggcagctgtgtctactaatgagccttattccatttcctgatgttttaaaagaagaaacactgccttgattatacgaatacactcagaaagtacatttagcttgtagtgttgaattctcttaaaggaatgcttgaattttttcattattgttttattgtttttatatacttgccttatttgaatgtttagcagtatccccttcccacttatatattgtgtgatatgattttgcttgcctataggagttaaaaacttttccatgtgaaatactctgacttaaacatacatgtaacttacataactgttaagaataacagtctgatttaataaatggttcattttaaaagttaaaaaaaaaa

SEQ ID NO: 116 - DNA, 1621 bp, Homo sapiens
gcggcaggtctctgcgcagcccagcccgccggtccacgccgcgcaccgctccgagggccagcgccacccgctccgcagccggcaccatgcgcgagatcgtgcacatccaggcgggccagtgcggcaaccagatcggcgccaagttttgggaggtcatcagcgatgagcatgggatcgaccccacaggcagttaccatggagacagtgacttgcagctggagagaatcaacgtgtactacaatgaggctgctggtaacaaatatgtacctcgggccatcctggtggatctggagcctggcaccatggactctgtcaggtctggacccttcggccagatcttcagaccagacaacttcgtgttcggccagagtggagccgggaataactgggccaagggccactacacagagggagccgagctggtcgactcggtcctggatgtggtgaggaaggagtcagagagctgtgactgtctccagggcttccagctgacccactctctggggggcggcacggggtccgggatgggcaccctgctcatcagcaagatccgggaagagtacccagaccgcatcatgaacaccttcagcgtcatgccctcacccaaggtgtcagacacggtggtggagccctacaacgccaccctctctgtccaccagctggtggaaaacacagatgaaacctactccattgataacgaggccctgtatgacatctgcttccgcaccctgaagctgaccacccccacctacggggacctcaaccacctggtgtcggccaccatgagcggggtcaccacctgcctgcgcttcccgggccagctgaacgcagacctgcgcaagctggcggtgaacatggtgcccttccctcgcctgcacttcttcatgcccggcttcgcgcccctgaccagccggggcagccagcagtaccgggcgctcacggtgcccgagctcacccagcagatgttcgactccaagaacatgatggccgcctgcgacccgcgccacggccgctacctgacggtggctgccatcttccggggccgcatgtccatgaaggaggtggacgagcagatgctcaacgtgcagaacaagaacagcagctacttcgtggagtggatccccaacaacgtgaagacggccgtgtgcgacatcccgccccgcggcctgaagatgtcggccaccttcatcggcaacagcacggccatccaggagctgttcaagcgcatctccgagcagttcacggccatgttccggcgcaaggccttcctgcactggtacacgggcgagggcatggacgagatggagttcaccgaggccgagagcaacatgaacgacctggtgtccgagtaccagcagtaccaggacgccacggccgacgaacaaggggagttcgaggaggaggagggcgaggacgaggcttaaaaacttctcagatcaatcgtgcatccttagtgaacttctgttgtcctcaagcatggtctttctacttgtaaactatggtgctcagttttgcctctgttagaaattcacactgttgatgtaatgatgtggaactcctctaaaaattacagtattgtctgtgaaggtatctatactaataaaaaagcatgtgtagaaaa

SEQ ID NO: 117 - DNA, 2267 bp, Homo sapiens
ggacaacaccttcaaagacaggccctctgagtccgacgagctccagaccatccaagaagacagtgcagccacctccgagagcctggatgtgatggcgtcacagaagagaccctcccagaggcacggatccaagtacctggccacagcaagtaccatggaccatgccaggcatggcttcctcccaaggcacagagacacgggcatccttgactccatcgggcgcttctttggcggtgacaggggtgcgcccaagcggggctctggcaaggtaccctggctaaagccgggccggagccctctgccctctcatgcccgcagccagcctgggctgtgcaacatgtacaaggactcacaccacccggcaagaactgctcactacggctccctgccccagaagtcacacggccggacccaagatgaaaaccccgtagtccacttcttcaagaacattgtgacgcctcgcacaccacccccgtcgcagggaaagggggccgaaggccagagaccaggatttggctacggaggcagagcgtccgactataaatcggctcacaagggattcaagggagtcgatgcccagggcacgctttccaaaatttttaagctgggaggaagagatagtcgctctggatcacccatggctagacgctgaaaacccacctggttccggaatcctgtcctcagcttcttaatataactgccttaaaactttaatcccacttgcccctgttacctaattagagcagatgacccctcccctaatgcctgcggagttgtgcacgtagtagggtcaggccacggcagcctaccggcaatttccggccaacagttaaatgagaacatgaaaacagaaaacggttaaaactgtccctttctgtgtgaagatcacgttccttcccccgcaatgtgcccccagacgcacgtgggtcttcagggggccaggtgcacagacgtccctccacgttcacccctccacccttggactttcttttcgccgtggctgcggcacccttgcgcttttgctggtcactgccatggaggcacacagctgcagagacagagaggacgtgggcggcagagaggactgttgacatccaagcttcctttgtttttttttcctgtccttctctcacctcctaaagtagacttcatttttcctaacaggattagacagtcaaggagtggcttactacatgtgggagcttttggtatgtgacatgcgggctgggcagctgttagagtccaacgtggggcagcacagagagggggccacctccccaggccgtggctgcccacacaccccaattagctgaattcgcgtgtggcagagggaggaaaaggaggcaaacgtgggctgggcaatggcctcacataggaaacagggtcttcctggagatttggtgatggagatgtcaagcaggtggcctctggacgtcaccgttgccctgcatggtggccccagagcagcctctatgaacaacctcgtttccaaaccacagcccacagccggagagtccaggaagacttgcgcactcagagcagaagggtaggagtcctctagacagcctcgcagccgcgccagtcgcccatagacactggctgtgaccgggcgtgctggcagcggcagtgcacagtggccagcactaaccctccctgagaagataaccggctcattcacttcctcccagaagacgcgtggtagcgagtaggcacaggcgtgcacctgctcccgaattactcaccgagacacacgggctgagcagacggccccgtggatggagacaaagagctcttctgaccatatccttcttaacacccgctggcatctcctttcgcgcctccctccctaacctactgacccaccttttgattttagcgcacctgtgattgataggccttccaaagagtcccacgctggcatcaccctccccgaggacggagatgaggagtagtcagcgtgatgccaaaacgcgtcttcttaatccaattctaattctgaatgtttcgtgtgggcttaataccatgtctattaatatatagcctcgatgatgagagagttacaaagaacaaaactccagacacaaacctccaaatttttcagcagaagcactctgcgtcgctgagctgaggtcggctctgcgatccatacgtggccgcacccacacagcacgtgctgtgacgatggctgaacggaaagtgtacactgttcctgaatattgaaataaaacaataaacttttaatggtaaaaaaaaaaaaaaaaaaaaaa

SEQ ID NO: 118 - DNA, 1429 bp, Homo sapiens
aaagctgcggcggcggttcgcgtttctcgtgtccgcttgactgacagctgcgcggcgggagcgggcggcgcgagcgggaggcggcggcgcagagcttggggcttccttggtcgcacccaccacctgcctgcccactggtcagccttcagggaccctgagcaccgcctggtctctttcctgtggccagcccagaactgaagcgctgcggcatggcgcgcgcctgcctccaggccgtcaagtacctcatgttcgccttcaacctgctcttctggctgggaggctgtggcgtgctgggtgtcggcatctggctggccgccacacaggggagcttcgccacgctgtcctcttccttcccgtccctgtcggctgccaacttgctcatcatcaccggcgcctttgtcatggccatcggcttcgtgggctgcctgggtgccatcaaggagaacaagtgcctcctgctcactttcttcctgctgctgctgctggtgttcctgctggaggccaccatcgccatcctcttcttcgcctacacggacaagattgacaggtatgcccagcaagacctgaagaaaggcttgcacctgtacggcacgcagggcaacgtgggcctcaccaacgcctggagcatcatccagaccgacttccgctgctgtggcgtctccaactacactgactggttcgaggtgtacaacgccacgcgggtacctgactcctgctgcttggagttcagtgagagctgtgggctgcacgcccccggcacctggtggaaggcgccgtgctacgagacggtgaaggtgtggcttcaggagaacctgctggctgtgggcatctttgggctgtgcacggcgctggtgcagatcctgggcctgaccttcgccatgaccatgtactgccaagtggtcaaggcagacacctactgcgcgtaggccgcccaccgcccgcttctctgccaaaaggacgcccacggggagatggccgcacccacagctgcctttcccaccaccagcctcggtgctctgccccatgctgggaggagggagggagggacaggtgcctggagcccccggaaccctgtttctggaaggccctagctcaggtggcttcagggcctccggaccccccctgggaggggtggccacgtgctggctgcggaacccagggcaggggtgggaggggcctccagcactttttatatttacgtattctccaaagcagtgttcacacgggagccagcctgtggcccccagcctcctggaaaacaggttggcgctggaggagccgggtcttggcatcctggaggtggccccactggtcctggtgctccaggcggggccgtggacccctcacctacattccatagtgggcccgtggggctcctggtgcatcttaataaagtgtgagcagcaaccttgaaaaaaaaaaaaaaaaa

SEQ ID NO: 119 - DNA, 8630 bp, Homo sapiens
taaatttaaaggcggggcggcctgtgagccctgaagtgccggccgcggagggtcctggccattttcctgggaccagttcagcctgataggatggcggaggaaggagccgtggccgtctgcgtgcgagtgcggccgctgaacagcagagaagaatcacttggagaaactgcccaagtttactggaaaactgacaataatgtcatttatcaagttgatggaagtaaatccttcaattttgatcgtgtctttcatggtaatgaaactaccaaaaatgtgtatgaagaaatagcagcaccaatcatcgattctgccatacaaggctacaatggtactatatttgcctatggacagactgcttcaggaaaaacatataccatgatgggttcagaagatcatttgggagttatacccagggcaattcatgacattttccaaaaaattaagaagtttcctgatagggaatttctcttacgtgtatcttacatggaaatatacaatgaaaccattacagatttactctgtggcactcaaaaaatgaaacctttaattattcgagaagatgtcaataggaatgtgtatgttgctgatctcacagaagaagttgtatatacatcagaaatggctttgaaatggattacaaagggagaaaagagcaggcattatggagaaacaaaaatgaatcaaagaagcagtcgttctcataccatctttaggatgattttggaaagcagagagaagggtgaaccttctaattgtgaaggatctgttaaggtatcccatttgaatttggttgatcttgcaggcagtgaaagagctgctcaaacaggcgctgcaggtgtgcggctcaaggaaggctgtaatataaatcgaagcttatttattttgggacaagtgatcaagaaacttagtgatggacaagttggtggtttcataaattatcgagatagcaagttaacacgaattctccagaattccttgggaggaaatgcaaagacacgtattatctgcacaattactccagtatcttttgatgaaacacttactgctctccagtttgccagtactgctaaatatatgaagaatactccttatgttaatgaggtatcaactgatgaagctctcctgaaaaggtatagaaaagaaataatggatcttaaaaaacaattagaggaggtttctttagagacgcgggctcaggcaatggaaaaagaccaattggcccaacttttggaagaaaaagatttgcttcagaaagtacagaatgagaaaattgaaaacttaacacggatgctggtgacctcttcttccctcacgttgcaacaggaattaaaggctaaaagaaaacgaagagttacttggtgccttggcaaaattaacaaaatgaagaactcaaactatgcagatcaatttaatataccaacaaatataacaacaaaaacacataagctttctataaatttattacgagaaattgatgaatctgtctgttcagagtctgatgttttcagtaacactcttgatacattaagtgagatagaatggaatccagcaacaaagctactaaatcaggagaatatagaaagtgagttgaactcacttcgtgctgactatgataatctggtattagactatgaacaactacgaacagaaaaagaagaaatggaattgaaattaaaagaaaagaatgatttggatgaatttgaggctctagaaagaaaaactaaaaaagatcaagagatgcaactaattcatgaaatttcgaacttaaagaatttagttaagcatgcagaagtatataatcaagatcttgagaatgaactcagttcaaaagtagagctgcttagagaaaaggaagaccagattaagaagctacaggaatacatagactctcaaaagctagaaaatataaaaatggacttgtcatactcattggaaagcattgaagacccaaaacaaatgaagcagactctgtttgatgctgaaactgtagcccttgatgccaagagagaatcagcctttcttagaagtgaaaatctggagctgaaggagaaaatgaaagaacttgcaactacatacaagcaaatggaaaatgatattcagttatatcaaagccagttggaggcaaaaaagaaaatgcaagttgatctggagaaagaattacaatctgcttttaatgagataacaaaactcacctcccttatagatggcaaagttccaaaagatttgctctgtaatttggaattggaaggaaagattactgatcttcagaaagaactaaataaagaagttgaagaaaatgaagctttgcgggaagaagtcattttgctttcagaattgaaatctttaccttctgaagtagaaaggctgaggaaagagatacaagacaaatctgaagagctccatataataacatcagaaaaagataaattgttttctgaagtagttcataaggagagtagagttcaaggtttacttgaagaaattgggaaaacaaaagatgacctagcaactacacagtcgaattataaaagcactgatcaagaattccaaaatttcaaaacccttcatatggactttgagcaaaagtataagatggtccttgaggagaatgagagaatgaatcaggaaatagttaatctctctaaagaagcccaaaaatttgattcgagtttgggtgctttgaagaccgagctttcttacaagacccaagaacttcaggagaaaacacgtgaggttcaagaaagactaaatgagatggaacagctgaaggaacaattagaaaatagagattctacgctgcaaactgtagaaagggagaaaacactgattactgagaaactgcagcaaactttagaagaagtaaaaactttaactcaagaaaaagatgatctaaaacaactccaagaaagcttgcaaattgagagggaccaactcaaaagtgatattcacgatactgttaacatgaatatagatactcaagaacaattacgaaatgctcttgagtctctgaaacaacatcaagaaacaattaatacactaaaatcgaaaatttctgaggaagtttccaggaatttgcatatggaggaaaatacaggagaaactaaagatgaatttcagcaaaagatggttggcatagataaaaaacaggatttggaagctaaaaatacccaaacactaactgcagatgttaaggataatgagataattgagcaacaaaggaagatattttctttaatacaggagaaaaatgaactccaacaaatgttagagagtgttatagcagaaaaggaacaattgaagactgacctaaaggaaaatattgaaatgaccattgaaaaccaggaagaattaagacttcttggggatgaacttaaaaagcaacaagagatagttgcacaagaaaagaaccatgccataaagaaagaaggagagctttctaggacctgtgacagactggcagaagttgaagaaaaactaaaggaaaagagccagcaactccaagaaaaacagcaacaacttcttaatgtacaagaagagatgagtgagatgcagaaaaagattaatgaaatagagaatttaaagaatgaattaaagaacaaagaattgacattggaacatatggaaacagagaggcttgagttggctcagaaacttaatgaaaattatgaggaagtgaaatctataaccaaagaaagaaaagttctaaaggaattacagaagtcatttgaaacagagagagaccaccttagaggatatataagagaaattgaagctacaggcctacaaaccaaagaagaactaaaaattgctcatattcacctaaaagaacaccaagaaactattgatgaactaagaagaagcgtatctgagaagacagctcaaataataaatactcaggacttagaaaaatcccataccaaattacaagaagagatcccagtgcttcatgaggaacaagagttactgcctaatgtgaaagaagtcagtgagactcaggaaacaatgaatgaactggagttattaacagaacagtccacaaccaaggactcaacaacactggcaagaatagaaatggaaaggctcaggttgaatgaaaaatttcaagaaagtcaggaagagataaaatctctaaccaaggaaagagacaaccttaaaacgataaaagaagcccttgaagttaaacatgaccagctgaaagaacatattagagaaactttggctaaaatccaggagtctcaaagcaaacaagaacagtccttaaatatgaaagaaaaagacaatgaaactaccaaaatcgtgagtgagatggagcaattcaaacccaaagattcagcactactaaggatagaaatagaaatgctcggattgtccaaaagacttcaagaaagtcatgatgaaatgaaatctgtagctaaggagaaagatgacctacagaggctgcaagaagttcttcaatctgaaagtgaccagctcaaagaaaacataaaagaaattgtagctaaacacctggaaactgaagaggaacttaaagttgctcattgttgcctgaaagaacaagaggaaactattaatgagttaagagtgaatctttcagagaaggaaactgaaatatcaaccattcaaaagcagttagaagcaatcaatgataaattacagaacaagatccaagagatttatgagaaagaggaacaatttaatataaaacaaattagtgaggttcaggaaaaagtgaatgaactgaaacaattcaaggagcatcgcaaagccaaggattcagcactacaaagtatagaaagtaagatgctcgagttgaccaacagacttcaagaaagtcaagaagaaatacaaattatgattaaggaaaaagaggaaatgaaaagagtacaggaggcccttcagatagagagagaccaactgaaagaaaacactaaagaaattgtagctaaaatgaaagaatctcaagaaaaagaatatcagtttcttaagatgacagctgtcaatgagactcaggagaaaatgtgtgaaatagaacacttgaaggagcaatttgagacccagaagttaaacctggaaaacatagaaacggagaatataaggttgactcagatactacatgaaaaccttgaagaaatgagatctgtaacaaaagaaagagatgaccttaggagtgtggaggagactctcaaagtagagagagaccagctcaaggaaaaccttagagaaactataactagagacctagaaaaacaagaggagctaaaaattgttcacatgcatctgaaggagcaccaagaaactattgataaactaagagggattgtttcagagaaaacaaatgaaatatcaaatatgcaaaaggacttagaacactcaaatgatgccttaaaagcacaggatctgaaaatacaagaggaactaagaattgctcacatgcatctgaaagagcagcaggaaactattgacaaactcagaggaattgtttctgagaagacagataaactatcaaatatgcaaaaagatttagaaaattcaaatgctaaattacaagaaaagattcaagaacttaaggcaaatgaacatcaacttattacgttaaaaaaagatgtcaatgagacacagaaaaaagtgtctgaaatggagcaactaaagaaacaaataaaagaccaaagcttaactctgagtaaattagaaatagagaatttaaatttggctcagaaacttcatgaaaaccttgaagaaatgaaatctgtaatgaaagaaagagataatctaagaagagtagaggagacactcaaactggagagagaccaactcaaggaaagcctgcaagaaaccaaagctagagatctggaaatacaacaggaactaaaaactgctcgtatgctatcaaaagaacacaaagaaactgttgataaacttagagaaaaaatttcagaaaagacaattcaaatttcagacattcaaaaggatttagataaatcaaaagatgaattacagaaaaagatccaagaacttcagaaaaaagaacttcaactgcttagagtgaaagaagatgtcaatatgagtcataaaaaaattaatgaaatggaacagttgaagaagcaatttgaggcccaaaacttatctatgcaaagtgtgagaatggataacttccagttgactaagaaacttcatgaaagccttgaagaaataagaattgtagctaaagaaagagatgagctaaggaggataaaagaatctctcaaaatggaaagggaccaattcatagcaaccttaagggaaatgatagctagagaccgacagaaccaccaagtaaaacctgaaaaaaggttactaagtgatggacaacagcaccttacggaaagcctgagagaaaagtgctctagaataaaagagcttttgaagagatactcagagatggatgatcattatgagtgcttgaatagattgtctcttgacttggagaaggaaattgaattccaaaaagagctttcaatgagagttaaagcaaacctctcacttccctatttacaaaccaaacacattgaaaaactttttactgcaaaccagagatgctccatggaattccacagaatcatgaagaaactgaagtatgtgttaagctatgttacaaaaataaaagaagaacaacatgaatccatcaataaatttgaaatggattttattgatgaagtggaaaagcaaaaggaattgctaattaaaatacagcaccttcaacaagattgtgatgtaccatccagagaattaagggatctcaaattgaaccagaatatggatctacatattgaggaaattctcaaagatttctcagaaagtgagttccctagcataaagactgaatttcaacaagtactaagtaataggaaagaaatgacacagtttttggaagagtggttaaatactcgttttgatatagaaaagcttaaaaatggcatccagaaagaaaatgataggatttgtcaagtgaataacttctttaataacagaataattgccataatgaatgaatcaacagagtttgaggaaagaagtgctaccatatccaaagagtgggaacaggacctgaaatcactgaaagagaaaaatgaaaaactatttaaaaactaccaaacattgaagacttccttggcatctggtgcccaggttaatcctaccacacaagacaataagaatcctcatgttacatcaagagctacacagttaaccacagagaaaattcgagagctggaaaattcactgcatgaagctaaagaaagtgctatgcataaggaaagcaagattataaagatgcagaaagaacttgaggtgactaatgacataatagcaaaacttcaagccaaagttcatgaatcaaataaatgccttgaaaaaacaaaagagacaattcaagtacttcaggacaaagttgctttaggagctaagccatataaagaagaaattgaagatctcaaaatgaagcttgtgaaaatagacctagagaaaatgaaaaatgccaaagaatttgaaaaggaaatcagtgctacaaaagccactgtagaatatcaaaaggaagttataaggctattgagagaaaatctcagaagaagtcaacaggcccaagatacctcagtgatatcagaacatactgatcctcagccttcaaataaacccttaacttgtggaggtggcagcggcattgtacaaaacacaaaagctcttattttgaaaagtgaacatataaggctagaaaaagaaatttctaagttaaagcagcaaaatgaacagctaataaaacaaaagaatgaattgttaagcaataatcagcatctttccaatgaggtcaaaacttggaaggaaagaacccttaaaagagaggctcacaaacaagtaacttgtgagaattctccaaagtctcctaaagtgactggaacagcttctaaaaagaaacaaattacaccctctcaatgcaaggaacggaatttacaagatcctgtgccaaaggaatcaccaaaatcttgtttttttgatagccgatcaaagtctttaccatcacctcatccagttcgctattttgataactcaagtttaggcctttgtccagaggtgcaaaatgcaggagcagagagtgtggattctcagccaggtccttggcacgcctcctcaggcaaggatgtgcctgagtgcaaaactcagtagactcctctttgtcacttctctggagatccagcattccttatttggaaatgactttgtttatgtgtctatccctggtaatgatgttgtagtgcagcttaatttcaattcagtctttactttgccactagagttgaaagataagggaacaggaaatgaatgcattgtggtaatttagaatggtgatagcaataccttcttcttgcatatggtaatacttttaaaagttgaattgttttatttatttgtatattttgtaaagaataaagttattgaaagaaatgtaaagttatctacatgacttagcatattccaaagcataatacatacattaatataaaacatcattttattaacaaaattgtaaatgtttttaataccttacacattcaataaatgtttagtagttctgaatcaccaaaaaaaaaaaaaaaaaa

SEQ ID NO: 120 - DNA, 1301 bp, Homo sapiens
gggaggagagaaaagccatggccgacaaggtcctgaaggagaagagaaagctgtttatccgttccatgggtgaaggtacaataaatggcttactggatgaattattacagacaagggtgctgaacaaggaagagatggagaaagtaaaacgtgaaaatgctacagttatggataagacccgagctttgattgactccgttattccgaaaggggcacaggcatgccaaatttgcatcacatacatttgtgaagaagacagttacctggcagggacgctgggactctcagcagctcctcaggcagtgcaggacaacccagctatgcccacatcctcaggctcagaagggaatgtcaagctttgctccctagaagaagctcaaaggatatggaaacaaaagtcggcagagatttatccaataatggacaagtcaagccgcacacgtcttgctctcattatctgcaatgaagaatttgacagtattcctagaagaactggagctgaggttgacatcacaggcatgacaatgctgctacaaaatctggggtacagcgtagatgtgaaaaaaaatctcactgcttcggacatgactacagagctggaggcatttgcacaccgcccagagcacaagacctctgacagcacgttcctggtgttcatgtctcatggtattcgggaaggcatttgtgggaagaaacactctgagcaagtcccagatatactacaactcaatgcaatctttaacatgttgaataccaagaactgcccaagtttgaaggacaaaccgaaggtgatcatcatccaggcctgccgtggtgacagccctggtgtggtgtggtttaaagattcagtaggagtttctggaaacctatctttaccaactacagaagagtttgaggatgatgctattaagaaagcccacatagagaaggattttatcgctttctgctcttccacaccagataatgtttcttggagacatcccacaatgggctctgtttttattggaagactcattgaacatatgcaagaatatgcctgttcctgtgatgtggaggaaattttccgcaaggttcgattttcatttgagcagccagatggtagagcgcagatgcccaccactgaaagagtgactttgacaagatgtttctacctcttcccaggacattaaaataaggaaactgtatgaatgtctgtgggcaggaagtgaagagatccttctgtaaaggtttttggaattatgtctgctgaataataaacttttttgaaataataaatctggtagaaaaatgaaaaaaaaaaa

SEQ ID NO: 121 - DNA, 6789 bp, Homo sapiens
ctcgcgccaggcgagtctccgcgtctccctcgcgaactcggtgaaaggaattggcgccgttcgacaccaggcggatccgctctgcagcacgaacccatctccagccgcagccgcagccgccgcccgggccgaggagcagccgcagcagccgccaccagtggccgagtgagcggagccgagtttgaggcagcgcctagcggtgaatcggggccctcaccatgagttcctcgcctgttaatgtaaaaaagctgaaggtgtcggagctgaaagaggagctcaagaagcgacgcctttctgacaagggtctcaaggccgagctcatggagcgactccaggctgcgctggacgacgaggaggccgggggccgccccgccatggagcccgggaacggcagcctagacctgggcggggattccgctgggcgctcgggagcaggcctcgagcaggaggccgcggccggcggcgatgaagaggaggaggaagaggaagaggaggaggaaggaatctccgctctggacggcgaccagatggagctaggagaggagaacggggccgcgggggcggccgactcgggcccgatggaggaggaggaggccgcctcggaagacgagaacggcgacgatcagggtttccaggaaggggaagatgagctcggggacgaagaggaaggcgcgggcgacgagaacgggcacggggagcagcagcctcaaccgccggcgacgcagcagcaacagccccaacagcagcgcggggccgccaaggaggccgcggggaagagcagcggccccacctcgctgttcgcggtgacggtggcgccgcccggggcgaggcagggccagcagcaggcgggaggggacggcaaaacagaacagaaaggcggagataaaaagaggggtgttaaaagaccacgagaagatcatggccgtggatattttgagtacattgaagagaacaagtatagcagagccaaatctcctcagccacctgttgaagaagaagatgaacacttcgatgacacagtggtttgtcttgatacttataattgtgatctacattttaaaatatcaagagatcgtctcagtgcttcttcccttacaatggagagttttgcttttctttgggctggaggaagagcatcctatggtgtgtcaaaaggcaaagtgtgttttgagatgaaggttacagagaagatcccagtaaggcatttatatacaaaagatattgacatacatgaagttcgtattggctggtcactaactacaagtggaatgttacttggtgaagaagaattttcttatgggtattctctaaaaggaataaaaacatgcaactgtgagactgaagattatggagaaaagtttgatgaaaatgatgtgattacatgttttgctaactttgaaagtgatgaagtagaactctcgtatgctaagaatggacaagatcttggcgttgccttcaaaatcagtaaggaagttcttgctggacggccactgttcccgcatgttctctgccacaactgtgcagttgaatttaattttggtcagaaggaaaagccatattttccaatacctgaagagtatactttcatccagaacgtccccttagaggatcgagttagaggaccaaaggggcctgaagagaagaaagattgtgaagttgtgatgatgattggcttgccaggagctggaaaaactacctgggttactaaacatgcagcagaaaatccagggaaatataacattcttggcacaaatactattatggataagatgatggtggcaggttttaagaagcaaatggcagatactggaaaactgaacacactgttgcagagagccccccagtgtcttgggaaatttattgagattgctgcccgaaagaagcgaaattttattctggatcagacaaatgtgtctgctgctgcccagaggagaaaaatgtgcctgtttgcaggcttccagcgaaaagctgttgtagtttgcccaaaagatgaagactataagcaaagaacacagaagaaagcagaagtagaggggaaagacctaccagaacatgcggtcctcaaaatgaaaggaaactttaccctcccagaggtagctgagtgctttgatgaaataacctatgttgaacttcagaaggaagaagcccaaaaactcttggagcaatataaggaagaaagcaaaaaggctcttccaccagaaaagaaacagaacactggctcaaagaaaagcaataaaaataagagtggcaagaaccagtttaacagaggtggtggccatagaggacgtggaggattcaatatgcgtggtggaaatttcagaggaggagcccctgggaatcgtggcggatataataggaggggcaacatgccacagagaggtggtggcggtggaggaagtggtggaatcggctatccataccctcgtgcccctgtttttcctggccgtggtagttactcaaacagagggaactacaacagaggtggaatgcccaacagagggaactacaaccagaacttcagaggacgaggaaacaatcgtggctacaaaaatcaatctcagggctacaaccagtggcagcagggtcaattctggggtcagaagccatggagtcagcattatcaccaaggatattattgaatacccaaataaaacgaactgatacatatttctccaaaaccttcacaagaagtcgactgttttctttagtaggctaactttttaaacattccacaagaggaagtgcctgcgggttccttttttagaagctttgtgggttgattttttttcttttcttttttgtacatttttaattgcagtttaaaagtgaatcgtaagagaacctcagcattgtgcacgataagagaatgtgtcagtatttcagggttctacattttatctgtaaaatgtgacttttttttttttttatcacaacagaagtaaaatgttgctttgtacctggtgtcttttattaagaatttactccccccatttctcacagagaataacagtcgggagtcattgtcacaatataatagaaatgttagcaaccagattcatgtaaggactaagtggtcctcatgaattgcattaagactctgtactgctcatattacactccatcctctctgtagtttgctgggtagtggagggggtaagctaaatcatagtttctgacaataactgggaaggttttttcttaaaataacaatggaattggtataattgggattgaaaactaaaacttggaactaagatagagaagatggagtgtatgtagaagggctgttaaaaatgtaaaacttggttgcattatttgtggaggctcaaacttgtgaaggttaataccataatttttccatttgttctgcattttgattctgaaaagaaagctggctttgcccatttcttattaaaaaaacttgttgtaaatccagttgtctaatgggatctatatgaagttagccatgtctgtatgcccttctcccacaaaatactgtataactagtgtgcttgtagtagttaactccaccatctttgtaagctaatgaaattgtgagtcacccatttatatcttaatttttaatcatgtcagttcttgaatgggtatctccttagcctgctgatttctttttctttctaaagaaagtgggtggagaaattaatttagacgtttgtttgcaataaaaagaattcattttactcttgttttgggattctcgccatcaaggttcaaaatccctttatataactcccaagaggagaaatttattaagtgtgtgctttctggacagcttattctttactctgcatagaacatttaggttttaaaaacttaaatgtatactgacaattgatacataattatgaagtaaagttgaattcttcccttcccctcccccccagacaacttttaacatatttaatgaggggaaaaggtactggctgggagaagttaacactgagtttatcatctttacagaatgctaatgctgtcctcaactgattattttatatacatatatatgatacatgaaactctgggatcagatgcttttagaagccatcatgcaagccagtcattgatgtcactgctacacaacactgctaacttgactgtagctatgtaataacattagatcccctaattgtaattatattgggtttgcacagaacactttaatcttcccctcaccaatgtgaagtgaggaatcaggagtcaaactgtagaactaaaatttgacttcagtctagcgtttccttggtgtttttaggttgctttggtaagtttaggtttgctatatttctgattgcttagaattttgttttagccctttaaaatcagatcataaatatgaattcatacttctaaggaattttcttgctataagctggagtttaggtgatgtataggttcagttgagacatttttggaacaggcaaatccttagttaacataagatatttaacagttgaagatagtgtcatggatttttatcttttttagcaagtaatgctaagaaccactggcctgagctactactcttcagtatacattattaggattgcatagacttactagaggaacagtttcaggttttgatgctaatcagtgttgtgtcctaaagttgtcctttgtgcctttaaaaagttttggatatatcttctagtttaaaattgcttattaaggaattcattttataattgcagtgggaaagtaatggtcaagtaacactaggtagactatcatgcctgtttagcccagagaatttggggggagagagaatagataaaaatggcacccagaaaaatgttaaaatctttagtcaagactagaattaatacaattgtctacacttgtatggcagaaataaccttataaagtgtttaaggaattcagagaagggaatgtaccaaataagcaacagggagaaaattaggtaagaagtaagatacgaacgagaaacctgatttattgctcatccttcccttgcctccctaatggcaagcaaaactctgaacatctgaaaaggatgtagttctggacaaatcctgactacccagaggaaactcactgtgagattgctgttgatttgaagggtgctttcactaaggttatattttaaagtagaataacacatgctgagtgtaaactggctttggattggtcagctgcagtagtacaaaaacagcatagaatttgagaaaactaaaactgctatgagatagctatgagaaaactaaaactgctatgagatagaaatgatgtaaaattatgtggaaagttttccctcatatactcacatacagcctttgaagggctctggctctgaccggttgatggccttgagcgagatgaaatcatgaaattgagtcaaatcaatttgacattgaaatgacaagaggaaactcttaaatacataaaaacaagctctcatttgcctaggatagatactgtcttaaaaataaagactgaacctagatgttctgagcactagcaacaaggtattttaacaagtttaaaggaattctctgaaaaagttataaaattattctaggaaacataaccataatagtgttttaagggactttcacctggggattttatattcatgaacagagtgtattctgtatttaaaatgtctcatttgtgggaattggatgacatgttttttgataaatttattcacaatataaattgactttttattctaggaccatgtgaataatgggttccattgcacaaatacaaatattttaatagcttcttaggcagtggtgtagacatcttggatataaataattgtagatcttgtatatttgatttttaaaaaactagaataaacagagaggcataaacatatcttagagtccaagtggtagtgtttagcattggatataataaatggatgttttacaaagtgtttccataattctcttcctatacataaatgtcttgttttcaaaagtggatggaacttggctgggtgtggtggctcacgcctgtaatcctagcactttgggaggccaaggcgggaggatcacttgagctcaggagtttgagaccatcctgggcaacatagtgagacctggtctcttgaaaaaaaaaaagtggatggaacttgtagcagagaattttatctacttctcaacctgcttcagaatacccatttgagatgttcccctggaaagatgaacacaatactgcatctgaagccatttcttcccacctaacattcttaaaatgattagagtctaaactttgtcattcattcctaattctggagctctgaggttgaggtgttcagagtttggtgaataattgggtttaagttttaacattttagtaataataaaagcaaacacatacatgttaaggcctgacaataggttgcaatacccatgcattgggactcatacccagcataaatggtgagggactgaacattagtgctttgagcaagaattggttaactacctgagatctctaaaacagtaatttgaattactaatacataaaccacaagtctcttcgaattgttaattgcctaaatttaccctaaaacttagttaacgctgcagtgcctttattaaagcttttttttgggggggggtgtgggcacagctactccataactttaaattttaaagcatgaaggtgatctagctagtgttagtgcttgagttggtagttacataggctgctcttgaatcgtcctgttttctttgcctagtattagcaccacaggtacatatttgtaaaataagcattaaaagtactttgtccagc

SEQ ID NO: 122 - DNA, 3838 bp, Homo sapiens
gattggcaggcgactccccgcccctgccccgcccccctgggcgaagagcgcggacttgtggggccgctggctgcagactggagctgcgcgggtcagggagataatggctgcgcggccgatcaccctcggcattgacctgggcaccacatctgtgaaggcagctctgctgagggccgcgcccgacgacccatccgggttcgcagtgctggcgagctgtgcccgtgctgcgcgggcagaggcggcggtcgagagcgcggtggccgggccccaggggcgggagcaggatgtgagtagaatcctccaagccctacacgagtgccttgctgcccttccccgaccccagctccggagcgtcgtgggcatcggggtgtcgggccagatgcatggagtcgtgttttggaaaacaggccaaggctgtgaatggacagagggagggattaccccggtgttcgagccccgagctgttagccacctggtcacgtggcaggatggccgatgtagcagcgaattcctggcctctctgccccagccgaagtctcatctcagtgtggccacgggcttcggctgtgcaaccatcttctggcttttgaaatatcgcccagagttcctgaagtcctacgacgcagccggtaccatccacgactatgtggttgccatgctgtgtggcttgccaagacctctgatgtccgaccagaatgctgccagctggggctatttcaacacgcagagccaaagctggaacgtagagacactgaggagctcgggttttcctgtccacctgctcccagacatcgccgagcctggcagtgtggcgggcagaacttcccacatgtggtttgaaatcccaaaggggacgcaggtgggagtggccttgggtgatttacaggcctctgtctattcctgcatggcccagaggacagatgcagttctcaacatcagcacctcggttcagctggcagcctccatgccttcaggattccagcctgcacagactccagaccctacggccccagtcgcctacttcccatacttcaacaggacctacctgggggtggccgcgtcactcaacgggggcaatgtgctggccacgttcgtccacatgctggttcagtggatggcagatctaggcctggaggttgaagaatccactgtgtattcacgcatgattcaggcagctgtgcagcagagagatacccacctgaccatcaccccgacagtgctgggggagaggcacctgccggaccagctggcctcagtgaccagaatctcctcctccgacctctccctggggcacgtgacccgggctctgtgccgaggcattgttcagaacctgcactccatgcttccgattcagcagctccaggagtggggcgtggagagggtgatgggcagtgggagtgcgctgtccaggaatgacgtgctgaagcaggaggtgcagagggctttccctttgcccatgtcctttgggcaggatgtggatgcagctgtcggggcagctctggtcatgctccggagacacctcaaccagaaggaatcttagacagcaaactctttcgccaaacgactgctgtgaattttacctgattaacattcctgacaccatctgtgggtcatcctttccctggaccgttcagtggacagctttcaagcagtgcttgttgtgaggtcccatctcggccaagaacttaccttcagaacatactctaataatgcagccaggagccgtcagccagatcccaaatgagtgccttccgaaattgacccacctgggagctatttacaaatgtccatgtgggagagagagagcatgagagcacagtagcccagcctgctggtcagcaggctcatctgtggttcacctgtagacagagagcagatcaatgtgtacttcagacaccagaaagtctggtggctttggtcccaagtgggaaaagagaactgccccatgcccagcttgtgattatcgtttttggagacctgaagcccacactcgggtcgtatggacttctggaaaagttcttgtctcctggactgaaccatgtgaccggaggcccctttcctagtctcatcctcccctggctgcagatgcttagctgggccagggattgacccaagcgcgatgcagcaggcaggctcagaagacgatgcggggctgtgtgccggccttcttgctgcatgtactcagcctcaggagagcttgctgcacccaggccgcccaggtcttcacagcacaactgcctggaaggcaggttgcgagaaggagaggcggatggcatgagcagcaagggggaccgatgctgtgcagctcacaccactccagaacctgacaaggcaccagcaggaccccttgccaggagcatgtctgtgcagcagtgtttttgcccctgcacattccagaagccctcatgggaagggatgcagccaggcagactcctgccagatggggcaggtagtttattcaaagagaactctgtatcccataggcccaggctctcctttcgcttggcgtgggctttgctggcccagtgtgtgctcctggctcagcagaaacatccatttgagttggcatccctgtagggatcccagagcgttgtaagccttcttgtgattggtagggatggctgtggggtggcttccaggagggggccaccattgccgcatctacttctagactcccaaaggagcccaggctcaggcaggcctggcccagagtcacgctggcaaccacgagtttgggaagcagtcgtattctctctctctctctctctctctctctcagtatccatgacaggtatgaaacatattgtctctttataaatgtcattttacaaattatgtgattatctggaagctctaagatgagagcaaatgcctgatcactctggccaaatgtcagatactaaagcccattcttggccgggcatgttggctcccgcctgtaatcccagcactttgggaagcccaagtgggtgaatcacctgaggtcaggagttcaagaccagcctgaccaacatggggataccccgtctctactaaaaatacaagccgggcgtggtggcgcatgcctgtaatcccagctactcaggaggctgaggcaggaaaatcacttgaactcgggaggcagaggttgcagtgagctgagatcgcgccattgcactccagcctgggtgacagagcaagactctgtctcataaataaatacaaagcccattcttccagagtcttgtgccttaaataaaacacacctctctgctgtgggaagactgtgcaatggcacagccgcagagcttggtttgggaggttgaagtgctctggggagaattcgtagatcatcctcagaaaagccttgccctggtgttctaccagaaaaacgtctcccaatcacccaggaaagctgtccacagtagtccccccttatccacggtgtcactttccatgggttcagttatctgcggtcaaccacggtctgacaatattaaatggaaaattcttcaaacagttcccaagttttcccttgtgcattgttctgagcagtgtgatggagagtctctgccgtgccatctgggatgcaaaccgtccctgtgttccccacgtccaggccgtagatgctccccgccggtcagtcacttagtcgtcagatcgcccgtcctggtatcacagtgcttctgttcaggtcagtctttttttacttcattagggccccaaagcaccagagtagtgatgctggtagtgatgctggctgttcggatatgccaaagagaaaccgtaaggtgcttcctttaagtgaaaagatgggaagaaaacagtcatatgctgaatcttctatctgtgaaattct

SEQ ID NO: 123 - DNA, 2359 bp, Homo sapiens
gccccgcgcgccgccggagttccgcggagttgaccgggtcggcgccgtcggtcctgagcgctgccttccgcgttccgccgcggccccacctggagcccccgccccgcgccatggccggagctcccggggcgcagcgctgacggcggcggggggagcgcgccatgcccagcaggaccggccccaagatggaagggagcggcggccgcgtccgcctcaaggcgcattacgggggggacatcttcatcaccagcgtggacgccgccacgaccttcgaggagctctgtgaggaagtgagagacatgtgtcgtctgcaccagcagcacccgctcaccctcaagtgggtggacagcgaaggtgacccttgcacggtgtcctcccagatggagctggaagaggctttccgcctggcccgtcagtgcagggatgaaggcctcatcattcatgttttcccgagcacccctgagcagcctggcctgccatgtccgggagaagacaaatctatctaccgccggggagccagaagatggaggaagctgtaccgtgccaacggccacctcttccaagccaagcgctttaacaggagagcgtactgcggtcagtgcagcgagaggatatggggcctcgcgaggcaaggctacaggtgcatcaactgcaaactgctggtccataagcgctgccacggcctcgtcccgctgacctgcaggaagcatatggattctgtcatgccttcccaagagcctccagtagacgacaagaacgaggacgccgaccttccttccgaggagacagatggaattgcttacatttcctcatcccggaagcatgacagcattaaagacgactcggaggaccttaagccagttatcgatgggatggatggaatcaaaatctctcaggggcttgggctgcaggactttgacctaatcagagtcatcgggcgcgggagctacgccaaggttctcctggtgcggttgaagaagaatgaccaaatttacgccatgaaagtggtgaagaaagagctggtgcatgatgacgaggatattgactgggtacagacagagaagcacgtgtttgagcaggcatccagcaaccccttcctggtcggattacactcctgcttccagacgacaagtcggttgttcctggtcattgagtacgtcaacggcggggacctgatgttccacatgcagaggcagaggaagctccctgaggagcacgccaggttctacgcggccgagatctgcatcgccctcaacttcctgcacgagagggggatcatctacagggacctgaagctggacaacgtcctcctggatgcggacgggcacatcaagctcacagactacggcatgtgcaaggaaggcctgggccctggtgacacaacgagcactttctgcggaaccccgaattacatcgcccccgaaatcctgcggggagaggagtacgggttcagcgtggactggtgggcgctgggagtcctcatgtttgagatgatggccgggcgctccccgttcgacatcatcaccgacaacccggacatgaacacagaggactaccttttccaagtgatcctggagaagcccatccggatcccccggttcctgtccgtcaaagcctcccatgttttaaaaggatttttaaataaggaccccaaagagaggctcggctgccggccacagactggattttctgacatcaagtcccacgcgttcttccgcagcatagactgggacttgctggagaagaagcaggcgctccctccattccagccacagatcacagacgactacggtctggacaactttgacacacagttcaccagcgagcccgtgcagctgaccccagacgatgaggatgccataaagaggatcgaccagtcagagttcgaaggctttgagtatatcaacccattattgctgtccaccgaggagtcggtgtgaggccgcgtgcgtctctgtcgtggacacgcgtgattgaccctttaactgtatccttaaccaccgcatatgcatgccaggctgggcacggctccgagggcggccagggacagacgcttgcgccgagaccgcagagggaagcgtcagcgggcgctgctgggagcagaacagtccctcacacctgggcccgggcaggccagcttcgtgctggaggaacttgctgctgtgcctgcgtcgcggcggatccgcggggaccctgccgagggggctgtcatgcggtttccaaggtgcacattttccacggaaacagaactcgatgcactgacctgctccgccaggaaagtgagcgtgtagcgtcctgaggaataaaatgttccgatgatgtggaaaaaaaaaaaaaaaaaaaaaaaaaaaaaaaaaaa

SEQ ID NO: 124 - DNA, 2430 bp, Homo sapiens
ctccggagacagcctcagaggggtgtccagagccaggcagcaaggaccagaggaaggtggacagagaccgaaaggacaaaggagagacacagagaaaaaaagagaccaaccccaaagggacaaagaccccaacgtttgtccacattgccgcagaggcagctggagccagtgctgcctgtccgtccccatgggccaccataggccatggctgcacgcttctgtcctctgggctggggtggccagcctgctcctccccccggccatgacccagcagctcagaggggatgggctaggcttcagaaaccggaacaacagcactggagtcgccgggctctccgaggaggcatcagcagagcttcgccaccacctccacagccctagagaccatccagatgagaacaaggatgtttccacagagaatgggcatcatttctggagccacccagaccgtgaaaaggaggatgaagatgtctccaaggaatatgggcacctactcccaggccacaggtcccaagaccacaaagtcggagatgagggtgtctcaggtgaggaggtctttgcagagcatggtgggcaggcccgtgggcacagaggccacgggagtgaagacacggaagactcagctgagcacaggcaccacctccccagccacaggagccacagccatcaagacgaggatgaggatgaagttgtgtccagtgagcatcaccatcatatcctcaggcatggacaccgaggccatgatggggaagatgatgaaggagaagaggaggaggaggaggaggaggaggaagaggaggcctccactgagtatggacaccaggcccacaggcaccgaggccatgggagtgaagaggatgaggatgtctcagatggacaccatcatcatggccccagccacaggcaccaaggccatgaagaagatgacgatgatgatgatgatgatgatgatgatgatgatgatgatgatgtctccattgaatatagacaccaggctcacaggcaccaaggccacgggattgaagaggatgaagatgtctcagatggacaccatcatcgcgaccccagccacaggcaccgaagccatgaagaagatgacaatgatgatgatgatgtctccactgagtatggacaccaggcccacaggcaccaagaccacagaaaggaagaggttgaggctgtctcaggtgaacaccaccatcatgtccctgaccacaggcaccaaggccacagagacgaggaagaagatgaggatgtgtccactgaacgttggcaccagggtccccaacatgtccaccatggccttgtagatgaggaagaggaagaagaggagatcacagtccagttcggccactatgttgcaagccaccaacctcgaggccacaagagtgatgaagaggacttccaagatgagtataaaacagaagtccctcaccatcaccaccacagagtccccagggaggaagatgaggaggtctctgctgagcttggccaccaggcccccagccacaggcaaagccaccaagatgaagaaactggccatggtcaaagagggtccatcaaagagatgagccatcaccccccaggacacacagtggtcaaggatagaagccatttgaggaaggatgattctgaggaggaaaaggagaaggaagaggaccccggctcccatgaggaagacgatgaaagttcagagcagggagagaaaggcacccatcatggcagccgggaccaggaagatgaggaggatgaggaggaaggtcatggcctcagcctgaaccaggaggaggaagaagaggaagacaaggaggaggaggaggaggaagaagacgaggagaggagggaagagagggctgaggttggggccccactgagcccagaccacagcgaggaggaagaggaggaggaggaggggctggaggaagatgagccccgcttcaccatcatccccaacccactggacaggagagaggaggctggaggtgcctccagcgaggaggaaagcggtgaggacacaggtccacaggatgctcaggagtatgggaactaccagccagggtccctgtgtggctactgctccttctgcaatcgatgcactgaatgtgagagctgtcactgtgatgaggagaacatgggtgagcactgcgaccagtgccagcactgtcagttctgctatctctgcccgctggtctgcgaaacggtctgcgctccaggaagctacgttgactatttctcctcgtccctttatcaggccctggcagacatgctggaaacgccggaaccctgacccagtcgctcgactgcgacgcaggtgtacctccccctgccttccaacccctttccacgagctatatttatttctccgaataaacgtgctccccgaaaaaaaaaaaaaaaaaaaaaaaaaaaaaaaaaaaaaaaaaaaaaaaa

SEQ ID NO: 125 - DNA, 3542 bp, Homo sapiens
gcactttcactctccgtcagccgcattgcccgctcggcgtccggcccccgacccgcgctcgtccgcccgcccgcccgcccgcccgcgccatgaacgccaaggtcgtggtcgtgctggtcctcgtgctgaccgcgctctgcctcagcgacgggaagcccgtcagcctgagctacagatgcccatgccgattcttcgaaagccatgttgccagagccaacgtcaagcatctcaaaattctcaacactccaaactgtgcccttcagattgtagcccggctgaagaacaacaacagacaagtgtgcattgacccgaagctaaagtggattcaggagtacctggagaaagctttaaacaagaggttcaagatgtgagagggtcagacgcctgaggaacccttacagtaggagcccagctctgaaaccagtgttagggaagggcctgccacagcctcccctgccagggcagggccccaggcattgccaagggctttgttttgcacactttgccatattttcaccatttgattatgtagcaaaatacatgacatttatttttcatttagtttgattattcagtgtcactggcgacacgtagcagcttagactaaggccattattgtacttgccttattagagtgtctttccacggagccactcctctgactcagggctcctgggttttgtattctctgagctgtgcaggtggggagactgggctgagggagcctggccccatggtcagccctagggtggagagccaccaagagggacgcctgggggtgccaggaccagtcaacctgggcaaagcctagtgaaggcttctctctgtgggatgggatggtggagggccacatgggaggctcacccccttctccatccacatgggagccgggtctgcctcttctgggagggcagcagggctaccctgagctgaggcagcagtgtgaggccagggcagagtgagacccagccctcatcccgagcacctccacatcctccacgttctgctcatcattctctgtctcatccatcatcatgtgtgtccacgactgtctccatggccccgcaaaaggactctcaggaccaaagctttcatgtaaactgtgcaccaagcaggaaatgaaaatgtcttgtgttacctgaaaacactgtgcacatctgtgtcttgtttggaatattgtccattgtccaatcctatgtttttgttcaaagccagcgtcctcctctgtgaccaatgtcttgatgcatgcactgttccccctgtgcagccgctgagcgaggagatgctccttgggccctttgagtgcagtcctgatcagagccgtggtcctttggggtgaactaccttggttcccccactgatcacaaaaacatggtgggtccatgggcagagcccaagggaattcggtgtgcaccagggttgaccccagaggattgctgccccatcagtgctccctcacatgtcagtaccttcaaactagggccaagcccagcactgcttgaggaaaacaagcattcacaacttgtttttggtttttaaaacccagtccacaaaataaccaatcctggacatgaagattctttcccaattcacatctaacctcatcttcttcaccatttggcaatgccatcatctcctgccttcctcctgggccctctctgctctgcgtgtcacctgtgcttcgggcccttcccacaggacatttctctaagagaacaatgtgctatgtgaagagtaagtcaacctgcctgacatttggagtgttccccttccactgagggcagtcgatagagctgtattaagccacttaaaatgttcacttttgacaaaggcaagcacttgtgggtttttgttttgtttttcattcagtcttacgaatacttttgccctttgattaaagactccagttaaaaaaaattttaatgaagaaagtggaaaacaaggaagtcaaagcaaggaaactatgtaacatgtaggaagtaggaagtaaattatagtgatgtaatcttgaattgtaactgttcttgaatttaataatctgtagggtaattagtaacatgtgttaagtattttcataagtatttcaaattggagcttcatggcagaaggcaaacccatcaacaaaaattgtcccttaaacaaaaattaaaatcctcaatccagctatgttatattgaaaaaatagagcctgagggatctttactagttataaagatacagaactctttcaaaaccttttgaaattaacctctcactataccagtataattgagttttcagtggggcagtcattatccaggtaatccaagatattttaaaatctgtcacgtagaacttggatgtacctgcccccaatccatgaaccaagaccattgaattcttggttgaggaaacaaacatgaccctaaatcttgactacagtcaggaaaggaatcatttctatttctcctccatgggagaaaatagataagagtagaaactgcagggaaaattatttgcataacaattcctctactaacaatcagctccttcctggagactgcccagctaaagcaatatgcatttaaatacagtcttccatttgcaagggaaaagtctcttgtaatccgaatctctttttgctttcgaactgctagtcaagtgcgtccacgagctgtttactagggatccctcatctgtccctccgggacctggtgctgcctctacctgacactcccttgggctccctgtaacctcttcagaggccctcgctgccagctctgtatcaggacccagaggaaggggccagaggctcgttgactggctgtgtgttgggattgagtctgtgccacgtgtttgtgctgtggtgtgtccccctctgtccaggcactgagataccagcgaggaggctccagagggcactctgcttgttattagagattacctcctgagaaaaaaggttccgcttggagcagaggggctgaatagcagaaggttgcacctcccccaaccttagatgttctaagtctttccattggatctcattggacccttccatggtgtgatcgtctgactggtgttatcaccgtgggctccctgactgggagttgatcgcctttcccaggtgctacacccttttccagctggatgagaatttgagtgctctgatccctctacagagcttccctgactcattctgaaggagccccattcctgggaaatattccctagaaacttccaaatcccctaagcagaccactgataaaaccatgtagaaaatttgttattttgcaacctcgctggactctcagtctctgagcagtgaatgattcagtgttaaatgtgatgaatactgtattttgtattgtttcaattgcatctcccagataatgtgaaaatggtccaggagaaggccaattcctatacgcagcgtgctttaaaaaataaataagaaacaactctttgagaaacaacaatttctactttgaagtcataccaatgaaaaaatgtatatgcacttataattttcctaataaagttctgtactcaaatgtagccaccaa

SEQ ID NO: 126 - DNA, 3028 bp, Homo sapiens
gtgcgaatccggtgccggcaagcggctggcgatgctggaggttcgctagccgaagcggctgcatctggcgccgcgtctgccccgcgtgctcggagcggattctgcccgccgtccccggagccctcggcgccccgctgagcccgcgatcacttcctccctgtgaccaaccggcgctgcaggttagagcctggcaatgccgtttgggtgtgtgactctgggcgacaagaagaactataaccagccatcggaggtgactgacagatatgatttgggacaggtcatcaagactgaggagttttgtgaaatcttccgggccaaggacaagacgacaggcaagctgcacacctgcaagaagttccagaagcgggacggccgcaaggtgcggaaagctgccaagaacgagataggcatcctcaagatggtgaagcatcccaacatcctacagctggtggatgtgtttgtgacccgcaaggagtactttatcttcctggagctggccacggggagggaggtgtttgactggatcctggaccagggctactactcggagcgagacacaagcaacgtggtacggcaagtcctggaggccgtggcctatttgcactcactcaagatcgtgcacaggaatctcaagctggagaacctggtttactacaaccggctgaagaactcgaagattgtcatcagtgacttccatctggctaagctagaaaatggcctcatcaaggagccctgtgggacccccgagtatctggccccagaggtggtaggccggcagcggtatggacgccctgtggactgctgggccattggagtcatcatgtacatcctgctttcaggcaatccacctttctatgaggaggtggaagaagatgattatgagaaccatgataagaatctcttccgcaagatcctggctggtgactatgagtttgactctccatattgggatgatatttcgcaggcagccaaagacctggtcacaaggctgatggaggtggagcaagaccagcggatcactgcagaagaggccatctcccatgagtggatttctggcaatgctgcttctgataagaacatcaaggatggtgtctgtgcccagattgaaaagaactttgccagggccaagtggaagaaggctgtccgagtgaccaccctcatgaaacggctccgggcaccagagcagtccagcacggctgcagcccagtcggcctcagccacagacactgccacccccggggctgcaggtggggccacagctgcagctgcgagtggagctacctcagcccctgagggtgatgctgctcgtgctgcaaagagtgataatgtggcccccgcagaccgtagtgccaccccagccacagatggaagtgccaccccagccactgatggcagtgtcaccccagccaccgatggaagcatcactccagccactgatgggagtgtcaccccagccactgacaggagcgctactccagccactgatgggagagccacaccagccacagaagagagcactgtgcccaccacccaaagcagtgccatgctggccaccaaggcagctgccacccctgagccggctatggcccagccggacagcacagccccagagggcgccacaggccaggctccaccctctagtaaaggggaagaggctgctggttatgcccaggagtctcaaagggaggaggccagctgagtaggcagcctggtgagggggggcaggggatgggcaggagggtgggagagtggatgaggggcttctcactgtacatagagtcactggcatgatgccctcgctcccccatgcccccacatcccagtggggcataactaggggtcacgggagagcagtctcgtctcctgtgtgtatgtgtgtgagtggtgggcaggccagtggcagggccggccccagcccctgcatggattccttgtggcttttctgtcttttgctagcttcaccagtttctgttccttgtgggatgctgctctagggatactcagggggctcctgctctccttccccttcccttcttgcctcaccattcccctaggcaggccctgcaggtcccacactctcccaggccctaaacttgggcggccttgccctgagagctggtcctccagcgaggccctgtcagcggtcttaggctcctgcacatgaaggtgtgtgcctgtggtgtgtgggctgctctaggagcagatacaggctggtatagaggatgcagaaaggtagggcagtatgtttaagtccagacttggcacatggctagggatactgctcactagctgtggaggtcctcaggagtggagagaatgagtaggagggcagaagcttccatttttgtccttcctaagaccctgttatttgtgttatttcctgcctttccgagtcctgcagtgggctgccctgtaccctgaacctcatgagcctctaagggaaaggaggaacaattaggacgtggcaatgagacctggcagggcagagtacaagcccagcacccagtgtcccagccttactgggtccttaccctgggccaaacagggagggctgatacctccttgctcttcctagatgcccacctcctacaatctcagcccacaagtcctctccaccctagggggcttgctgcatggcaataactcataatctgatttggaggtttgccctttacaggggcagattttctgctcagttcaacaatgaaatgaagaggaactccctctttctacagctcacttctatcagaggcccaggtgcctcagagccacattgagttgctttttctgggatgaggaagtagggttaaactccccagtttcctgagggaggctcctgacaggtgccctttgtcagaccctaccacagcctggataggcagccacattggtcctcgcccttgctcggcactccgtggtggtcctgcccttctccctgcatgcctgtgggtctgctctggtgtgtgaaggtcggtgggttaactgtgtgcctactgaacctggcaaataaacatcaccctgcaaagcc

SEQ ID NO: 127 - DNA, 2774 bp, Homo sapiens
tgacccactgctcttcctcttaagaaagtgctccattccttccggcgcccggagctgctggcccaaagggatccggagcgagctagggcagacaccatgaccacccttgatgataagttgctgggggagaaactgcagtactactatagcagcagtgaggatgaggacagtgaccacgaggacaaggaccgaggcagatgtgccccagccagcagttctgtgcctgcagaggctgagctggcaggcgaaggcatctcagttaacacaggcccaaaaggtgtgatcaatgactggcgccgcttcaagcagttggagacagagcagagggaggagcagtgccgggagatggaaaggctgatcaagaagctgtcaatgacttgcaggtcccatctggatgaagaggaggagcaacagaaacagaaagacctccaggagaagatcagtgggaagatgactctgaaggagtttgccataatgaatgaggaccaagatgatgaagagtttctgcagcagtaccggaagcagcgaatggaagagatgcggcagcagcttcacaaggggccccaattcaagcaggtttttgagatctccagtggagaagggtttttagacatgattgataaagaacagaaaagcattgtcatcatggttcatatttatgaggatggcattccagggaccgaagccatgaatggttgcatgatctgccttgccgcagagtacccagctgtcaagttctgcaaggtgaagagctcagttattggcgccagcagtcagttcaccaggaatgcccttcctgccctgctgatctataaggggggtgaattgatcggcaattttgttcgtgttactgaccagctgggggatgatttctttgctgtggaccttgaagcttttctccaggaatttggattactcccagaaaaggaagtcttggtgctgacatctgtgcgtaactctgccacgtgtcacagtgaggatagcgacctggaaatagattgaactgatagtctagttgcatagatttctcattgtttgggttggaatacacgtcattgtttatttttgttcctttgtcttctggcttttcagctgttctttgtagtcccttttattatgcataaaataaagaaattcttagattaaatcagaatgctgaataaccttgtagctagcaataaggtgacttacagttgtataaacaggaagccaggcttttgaactgtttacttaagattctgtggtgtgacatctctgttattgtttccagtcaatatttacaaagcatcctaaagacagggtcttggaaattgtcttcagatgatcttagaggtctctgccaagtctgagagtataattctgtaggtattgtgttatttgcaacgtaaatagtgcattttcttaatcaaatgattgtaaattatatttacttgtaatcagttccatagctttagacggtggttagattttttttttccccaccagggtcttgtttaaaggggtgagccaccgcacccagtcctgaggggtggcctctgctgctggatttcatgtcttcctccagcatgactaagtctggaacagcaggaagggttgatgcttactgacctggtgatgttagaagacaagtagtttatggatttaaacattagagctggagtggggctggaaatctttgtaaaggaagttctttcagtaagatgcccctgcttgtctttgtctcttttttgtttaacaaggtaactttttgtttaacaaggtaactttttgtttaacctagattttttttaaaactttttttttttttcatattggaaaagtaattcatattcagtagaggaaaactgaccaaaacagaagcaaaaataagaaaattaaaataatctctaatcctactacctagaataaaacactattaatattttggtctgtttcctgccaaggtgttttctgtgtatacatggatattttgtttgtttttaaacaaaacgatgggatcattctgaacatactgttctatagtatggtcagctaataatatatcagacctttttttatattattaaatattctacaactttttaaaaatgtctattaatattccatcgtatagatgtgatataatttgcttgatggttgtctcttaaaaagaaagatagcaaatactttttttaaattacaaaagtgatagatgttcattgtagaaaatgtaataaacactgttaagacttaaaagccatataattccaccaaccaaaattaatcccttttgtcatatttctagtcatttttatagcctttttttctatgtatttataataattatcatttgcgtttttttcctttttttaactttaaaaatgtatattctagggtcaggggaaatgtaatctggaattaaatattagccttaaaattcacaattttgattttcctggcttttcaggaattgactaactgtaaaagagtcttgaaagtatttagtcaacaaacagagtgcattttttttttttttgactaagaaagctcgttgtagtagaaagggtggaatgtattgaaaattattagaagcagggaagtattgttagtctagcttatttcctttcagtcttttttcaatatttttataaacattgagtacttactgaatttagttctgtgctcttccttatttagtgttgtatcataaatactttgatgtttcaaacattctaaataaataattttcagtggcttcataataaaaaaaaaaaaaaaaaaaaaaaaaaaaaaaa

SEQ ID NO: 128 - DNA, 1817 bp, Homo sapiens
cggacctccacactgagccatgcccacccccgacgccaccacgccacaggccaagggcttccgcagggccgtgtctgagctggacgccaagcaggcagaggccatcatgtccccgcggttcattgggcgcaggcagagcctcatcgaggacgcccgcaaggagcgggaggcggcggtggcagcagcggccgctgcagtcccctcggagcccggggaccccctggaggctgtggcctttgaggagaaggaggggaaggccgtgctaaacctgctcttctccccgagggccaccaagccctcggcgctgtcccgagctgtgaaggtgtttgagacgtttgaagccaaaatccaccatctagagacccggcccgcccagaggccgcgagctgggggcccccacctggagtacttcgtgcgcctcgaggtgcgccgaggggacctggccgccctgctcagtggtgtgcgccaggtgtcagaggacgtgcgcagccccgcggggcccaaggtcccctggttcccaagaaaagtgtcagagctggacaagtgtcatcacctggtcaccaagttcgaccctgacctggacttggaccacccgggcttctcggaccaggtgtaccgccagcgcaggaagctgattgctgagatcgccttccagtacaggcacggcgacccgattccccgtgtggagtacaccgccgaggagattgccacctggaaggaggtctacaccacgctgaagggcctctacgccacgcacgcctgcggggagcacctggaggcctttgctttgctggagcgcttcagcggctaccgggaagacaatatcccccagctggaggacgtctcccgcttcctgaaggagcgcacgggcttccagctgcggcctgtggccggcctgctgtccgcccgggacttcctggccagcctggccttccgcgtgttccagtgcacccagtatatccgccacgcgtcctcgcccatgcactcccctgagccggactgctgccacgagctgctggggcacgtgcccatgctggccgaccgcaccttcgcgcagttctcgcaggacattggcctggcgtccctgggggcctcggatgaggaaattgagaagctgtccacgctgtactggttcacggtggagttcgggctgtgtaagcagaacggggaggtgaaggcctatggtgccgggctgctgtcctcctacggggagctcctgcactgcctgtctgaggagcctgagattcgggccttcgaccctgaggctgcggccgtgcagccctaccaagaccagacgtaccagtcagtctacttcgtgtctgagagcttcagtgacgccaaggacaagctcaggagctatgcctcacgcatccagcgccccttctccgtgaagttcgacccgtacacgctggccatcgacgtgctggacagcccccaggccgtgcggcgctccctggagggtgtccaggatgagctggacacccttgcccatgcgctgagtgccattggctaggtgcacggcgtccctgagggcccttcccaacctcccctggtcctgcactgtcccggagctcaggccctggtgaggggctgggtcccgggtgccccccatgccctccctgctgccaggctcccactgcccctgcacctgcttctcagcgcaacagctgtgtgtgcccgtggtgaggttgtgctgcctgtggtgaggtcctgtcctggctcccagggtcctgggggctgctgcactgccctccgcccttccctgacactgtctgctgccccaatcaccgtcacaataaaagaaactgtggtctcta

SEQ ID NO: 129 - DNA, 5899 bp, Homo sapiens
tattgcactacatcactgagttcccgtatgccaagttatggccacttacatccacgtcagcaaaactggtgccgagggagctgttcttgacgaagctaaaaatatcaataagtctttgtctgctcttggaaatgtgatctctgctttggcagaagggacaaaaacacatgtgccataccgggacagcaagatgactcggattcttcaggactctttgggtgggaactgcagaaccaccatcgtcatttgctgttctccttctgtcttcaatgaggctgagaccaagtccacactgatgttcggacagagagctaagaccatcaagaatacagtctctgtgaacctagaactgacagcagaagaatggaagaagaaatatgaaaaagagaaagagaaaaacaagactttgaagaatgttatccagcatctggagatggagctaaacaggtggaggaatggagaagctgtgcctgaggatgaacagatcagtgccaaggaccagaagaacctggagccttgtgataacacccccatcatagacaatattgctcctgttgttgctggcatctctacagaggagaaagagaagtacgatgaggagatctccagtctctacagacaactggatgacaaggatgatgaaattaaccagcagagccagctggctgaaaagctgaagcaacagatgttggatcaggatgagcttttagcttccacaagaagagactatgagaagatacaggaggagctgacacgtctccagattgaaaatgaggcagccaaggatgaggtgaaagaagttctccaggccctggaggagctggctgtcaattatgaccagaaatcacaggaagtggaggataagacccgggccaatgagcagctgacagacgagctggcccagaaaacgactacattgacaaccacacagagagagctgagccagctacaagagcttagcaaccaccagaagaaaagggcaactgagatcctgaatttgctgttgaaagatctgggggagataggtggaattattggcaccaatgatgtgaaaactttggcagatgtgaatggagtcattgaggaggagtttaccatggcccgcctgtacatcagcaagatgaagtcagaggtcaagtccctggtgaaccgcagcaaacagctcgagagcgcccagatggactccaacaggaagatgaatgccagcgagcgggagctggcagcctgccagctgctcatctcccagcacgaagccaagatcaagtctctgacagactacatgcagaacatggaacagaagaggaggcagctagaagagtcccaggactcgctcagcgaagagctggcaaagctccgagcccaggaaaaaatgcacgaagtcagcttccaggataaggagaaggaacatctgacgcggttgcaggatgctgaagaaatgaagaaggcgctggagcagcagatggagagccaccgggaagctcaccagaagcagctgtccagactccgagacgaaattgaggagaagcagaaaatcattgatgagattcgggatttgaatcagaaactgcaactggaacaggagaagcttagttctgattataacaagctgaaaatagaggaccaagagagagaaatgaagctggaaaagctcttattgctcaacgataaaagggaacaagccagagaagacctcaaagggctggaggagacagtgtctagagaattgcagacactgcacaaccttcggaaactctttgtccaggatctgaccacccgagttaaaaaaagtgtggagttggacaacgatgatggagggggcagtgctgcccagaagcagaaaatttccttcttggagaataacctggagcagctcaccaaagttcacaagcagctggtccgggacaacgcagacctgcgctgtgaactgcccaagctggagaagcggctgcgtgccacggcggagcgcgtcaaggctctggagagcgcgctgaaggaggccaaggagaacgccatgcgggaccgtaagcgctaccagcaggaggtggatcgtatcaaggaggccgtgcgggccaagaacatggccagaagggcccattcagcccagatcgccaagcccatccgccccggacactacccggcctcatctccaacggccgtccatgccattcgagggggaggaggcagctcttcaaattccactcactaccagaaataaatacaaaatatgactccacgtagcatgtcaaggactacattaatcaccaattcctttatttttccccccctacagtttccattttttttttatacttgcttactccagccatctgcagtacaccagtttcaggtcttttgagctgtgtagagtttctgtgtgtacagatgtgtgctcggacttttctctttttgagaaatctgaaggagatggttgcagaagatccacttactactgagaaccattaccaccgactcggcctccggggtgttgggtggtttctgggtggttcctggagcctcctctgggcagtgcactgtcccatctgtacgccctaatgtgccattccctagaggggaacaaccaagtgccgtggaggcagatgatcatggtctgcctcaactgtctggtttcctgtaaaataaacacattgttttatatttttagggaacaaaaagtgctgctatagggttcaaagttttccttctgaacacttttccgaaacaaattaccccaaagacacattttgaatatcctggtcacatctttggatctgtaaaatataccttttagtatggcacctgttaaaatgcaaagcaaatttctttggggcagaaaaacaatctgacagtagcagtgtagaatttgttcattcaaatacatctgtgtaaatgcaaaaagtcataaaattcacctccgagctgcttgcttttgaacctgcagcaactagtcttagccggcccggtttgaacatcgttctttcagaagtgctgaaaatgctgcaaagttggataagtggaaatgtggctgcccctctcctcactacttcctctctgatcgttctgaagcttgcattgggaatggctgctttctctaaccattttcagcttgagtgggtattgctgaagaaatccaacatcattccagcagttgaaaaaggaagccttcgggagaaagtgcttgtcaaaattttgttctttgtgcttgtgtatgagtaagttgccatgaataagttattattttaacccataattggcgactgtttatatgaattctttctttggcaccaaataggtttcatcttcttaggcacaattagaaaaaatccacatagatggatattttacatttagttattgctttatccaaatacatgaatctaaagctgaatcaacccttacttccagttgtgcttattaagaagatcaatttccaagtagtaaagttttcagggaaactgactgtgctgctatttgttttgacaaatttgggggtaagtcaatgacaaccaaaccaatctcggtggaaactcctatcctatcatgttgtgtgcccaagatgagtgagctggcactgtgccctgaagctttcaccactgtaatgaaatatatgccaggggagactttgggcttttctcatgactgtgtgggtcgaaggtagctcaagtgtgtgtgtgtgtgtgtgtgtgtgtgtgtgtgtgtgtgtgtgtgtatgtgtgtaaagtgctaagaactgtgcattgacatccaaacatttcttgtacaaaatttccctagcaaagcaaacctgctttgacttaatttatttgttaaatgttgcactttgtttatgtatgttttgtttttggtggggaataaggagagagaggacgacaaattctattgaagtatttattttgtgaagatggcaattttgcatttgtttaaatttttttcattctttaattttgttatcagtgccagcccaatatacctgctctaccattatttgcggtctgataaaagggtccttgtggggcaggttttgcaaagcttatcaggtaataacatatgccacataaccttgttgatatgtttgcttctgatttgggaagctaaacattggtgtttgagaggattgccaattattaattgtcattaccactactctccattactttttgtttggaaattgaacaaaggtcagtaatggtttttggctcttgttaatatccatcataaaatagattgttttagattctttccagggtgatttttccctgggtaccccgtttctacttctaaagaattgcttggcactttcatgtttcaaagggaaacattcgcttgtagttccattttacttgatctctacaagggactgacaacatttgctttacttttattcacagagaaagttggctttgatgtctcttaaagataattctgctagttgctgatcagccagtcagttcacctagcttcaatctttataggacttctaatctaattttcctatagtgtgactaaaagggaggcaaattattggaacggattattcaaatggatccttaaatattgctatgtataataagccagttattatatcaggaccatgttctctgtaggccactttctaaaaaagccacatatgtgcaattttcaggtttttagactattgctccctgtactttaaatgtaaaaaccacacttctgaacaactaagctcatgaatatgattttggttatatgcagcttttgactagcatgtattgtgtctttttctcctctatgaataattttatatttcatgctacttcttgaaagtttactctttgatgctctaagagaacagccagatggtttatatgaataatctttatctgcaggatggtggattggtaaattaggagaatgttgtttgagatatcaagatttatgtctgggaactaaaatatataatgccaaatgtgtttttgtcaattactagagaattctgtgcaaacatatcatctcttcaaatgctgcacactttgcttttgttaaacagcaggtagtagacagaacaataacagtttcgcgttaagacttttaaaggaaatagaatcgtgattaagaaatcagaatttatagatatattgggataaatgaagaaataaaaatgtttgtctagaatgtagcatctagtgactttttaaagccctaacgtttacataaagaagctctagttcttatagaaataacaaagcaaataaaagttcttaacaatcccctctttcgaagtgcatttttttaaagcagggcaggagacatttggactctagctatatgacatactgggaaaggcagagggtggagggaagatttcacttcattgtctagcccagaatcttgagcaagctaaagaaaccatcataatctaaaattgcttcatttaacactaacaatttagactttttaaaccaagcattgaataatggctggataactgccgaagtaagcgccgctccatgaagtctgcttacttatttaaaaattgtgtatcagttttaaatactgttcattgtgtgcagatataaggggaatagggcattctgtagaattatacatgtctagtttgtaaagtgtgtcctgtgtactgcagatgtgtgttctctgggctttatgtatctgtacagtagctttcacattaaaaaaattgtggacaaacttgtccggggggtttgaggggagaatggtggtttatatcaataacgatgctgtactatagtccatgtaacaaaagatctggaagtcaccctcctctggcccacggaaaattttggtaatcttctaggttctaaaatgaagatgtatgggtactctggcagactgcatgttgtataatttgaaaaatactaaaagtggaaaataaaattgaattaaa

SEQ ID NO: 130 - DNA, 668 bp, Homo sapiens
gcaaggcgggggctgagctgcgccggccggaaacccagcaggcggcgaagatggcggagaacagcggtcgcgccggcaagagcagcgggagcggcgcggggaagggggcggtgtccgcagagcaggtgattgctggcttcaaccgccttcggcaggaacagcgaggcctggcatccaaagcagctgagttggagatggagttgaatgagcacagcctagtgatcgatacactgaaggaggtagatgaaactcgtaagtgctaccgcatggttggaggagtgctggtggagcgaactgtcaaagaggtgctgcccgctttggagaacaacaaggagcagatacagaagatcattgagacactgacacagcagcttcaggcaaagggaaaagaactaaatgaattccgggaaaagcacaacattcgtctcatgggagaagatgagaagccagcagccaaggaaaactcagaaggggctggggctaaggccagctcagctggagtgttggtctcctagggaccaaggcctttgcatttttttctaccctgactcccacttctaatttctctttattgttattattattattttctctgctattgtaatatttttttgttaattaaatgttttggtcagaatcttaaaaaaaaaaaaaaaaaaaaaaaaaaa

SEQ ID NO: 131 - DNA, 1434 bp, Homo sapiens
ggggagctatgaaccttaagattagaccactaactcgaatctaaatgagctgcccttgtctcctacaaaagaaaagttgggcaggtagggtattctaatgagggtttctctttctcttaagcaaatgatgatcaaagttaactgacaaactgtcacggaatctgccagacctcactctggccttgctgcttctctccagctcctgaacttttctttcttccatcatgctctgagcccattccttgaaaactaaaaggtccctgactcccagtctgcagccatcctgggcctgctgagctctgattcaagtgcctgcctctgccccttggtgggctgaagcttcatggaggaggagcttgccatccaacagggtcaactggagacaactctgaaggagcttcagaccctgaggaacatgcagaaggaagctattgctgctcacaaggaaaacaagctacatctgcagcaacatgtgtccatggagtttctaaagctgcatcagttcctgcacagcaaagaaaaggacattttaactgagctccgggaagaggggaaagccttgaatgaggagatggagttgaatctgagccagcttcaggagcaatgtctcttagccaaggatatgttggtgagcattcaggcaaagacggaacaacagaactccttcgactttctcaaagacatcacaactctcttacatagcttggagcaaggaatgaaggtgctggcaaccagagagcttatttccagaaagctgaacctgggccagtacaaaggtcctatccagtacatggtatggagggaaatgcaggacactctctgcccaggcctgtctccactaactctggaccctaaaacagctcacccaaatctggtgctctccaaaagccaaaccagcgtctggcatggtgacattaagaagataatgcctgatgatcctgagaggtttgactcaagtgtggctgtactgggctcaagaggcttcacctctggaaagtggtactgggaagtagaagtagcaaagaagacaaaatggacagttggagttgtcagagaatccatcattcggaagggcagctgtcctctaactcctgagcaaggattctggcttttaagactaaggaaccaaactgatctaaaggctctggatttgccttctttcagtctgacactgactaacaacctcgacaaggtgggcatatacctggattatgaaggaggacagttgtccttctacaatgctaaaaccatgactcacatttacaccttcagtaacactttcatggagaaactttatccctacttctgcccctgccttaatgatggtggagagaataaagaaccattgcacatcttacatccacagtaatgagtcataatattatacaaattcagagtgttattaaagaggtattgaaatatttaaaaaaaaaa

SEQ ID NO: 132 - DNA, 2173 bp, Homo sapiens
ccgcgccgggcccagagccgcagccgcagccgccgctacagtccgggccgggctccaccgcgcatcctgctccactctggcgaccgcccccggggcccccgccgcgggcgcggcgcccgccatgggcgaggaggactactatctggagctgtgcgagcggccggtgcagttcgagaaggcgaaccctgtcaactgcgtcttcttcgatgaggccaacaagcaggtttttgctgttcgatctggtggagctactggcgtggtagttaaaggcccagatgataggaatcccatctcatttagaatggatgacaaaggagaagtgaagtgcattaagttttccttagaaaataagatattggctgttcagaggacctcaaagactgtggatttttgtaattttatccctgataattcccagctggaatacacacaggagtgcaagactaagaatgccaacattctaggattctgctggactagttcaactgaaattgtcttcataacagatcaaggaatcgaattttaccaggtattaccagagaaacggagtctgaaactcttgaagagccacaatctcaatgtgaattggtacatgtactgccccgagagcgccgtgatcttgctgtctaccacggtcctggagaatgtcctgcagccttttcactttagggctggcactatgtcgaagctgcccaaatttgagattgaattaccagctgcgcctaagtcaactaaacccagcctttccgaaagagacatcgcaatggctaccatatacgggcagctgtatgttctcttcttgaggcatcattctcggacctccaacagcacaggagcggaggtggtcctctatcatctaccacgagaaggtgcctgtaaaaagatgcacatattgaagttaaataggacgggaaagtttgccctgaacgtggtggacaacctggtagtcgtgcatcatcaggatacagagacatcggtaatattcgatatcaagttacggggagagtttgacggctccgttaccttccaccaccccgtgcttcccgctcgatcgatccagccctatcagatccccatcacaggtcctgctgccgtgaccagccagtctcctgttccatgtaaactctattcttcatcttggattgtctttcaacctgacatcattatcagcgcaagccaaggttacctctggaacctccaagtgaaacttgagcccatagtaaatctcttaccagacaaaggaagactcatggactttctcctccagagaaaggaatgcaagatggtcatcctgtctgtctgttcacagatgttaagtgagtcagacagagcatcgctgcccgtgatagccactgtttttgataaactcaaccatgagtataaaaagtacctggatgccgagcagagttatgcgatggcggtggaagcagggcagagccgaagcagcccgctcctcaagaggccggtgcggacccaggcggtgctggaccagtcagatgtgtacacccatgtcctgtcagcctttgtggaaaagaaggagatgcctcataaatttgtgatagccgtgctgatggaatacattcgttctcttaaccagtttcagattgcagtacagcattacctacatgaacttgttatcaaaacccttgtccagcacaacctcttttatatgctgcatcagttcctgcagtaccacgtcctcagcgactccaaacctttggcttgtctgctgttatccctagagagtttctatcctcctgctcatcagctatctctggacatgctgaagcgactttcaacagcaaatgatgaaatagtagaagttctcctttccaaacaccaagtgttagctgccttaaggtttatccggggcattggtggccatgacaacatttctgcacgaaaatttttagatgctgcaaagcagactgaagacaacatgcttttctatacaatattccgcttttttgaacagcgaaaccagcgtttgcgagggagccccaatttcacaccaggggaacactgtgaagaacatgttgcttttttcaaacagatttttggagaccaagctctaatgaggcctacaacattctgaaatcacttgctgtttttttatataaaaatgtgtacaaagttaatttattgcattaataaagctctttaaactataaaa

SEQ ID NO: 133 - DNA, 3734 bp, Homo sapiens
gcggagcgtgtgacgctgcggccgccgcggacctggggattaatgggaaaagttttggcaggagcgggagaattctgcggagcctgcgggacggcggcggtggcgccgtaggcagccgggacagtgttgtacagtgttttgggcatgcacgtgatactcacacagtggcttctgctcaccaacagatgaagacagatgcaccaacgaggctgatgggaaccaccctgtagaggtccatctgcgttcagacccagacgatgccagagctatgactgggcctgcaggtgtggcgccgaggggagatcagccatggagcagccacaggaggaagcccctgaggtccgggaagaggaggagaaagaggaagtggcagaggcagaaggagccccagagctcaatgggggaccacagcatgcacttccttccagcagctacacagacctctcccggagctcctcgccaccctcactgctggaccaactgcagatgggctgtgacggggcctcatgcggcagcctcaacatggagtgccgggtgtgcggggacaaggcatcgggcttccactacggtgttcatgcatgtgaggggtgcaagggcttcttccgtcgtacgatccgcatgaagctggagtacgagaagtgtgagcgcagctgcaagattcagaagaagaaccgcaacaagtgccagtactgccgcttccagaagtgcctggcactgggcatgtcacacaacgctatccgttttggtcggatgccggaggctgagaagaggaagctggtggcagggctgactgcaaacgaggggagccagtacaacccacaggtggccgacctgaaggccttctccaagcacatctacaatgcctacctgaaaaacttcaacatgaccaaaaagaaggcccgcagcatcctcaccggcaaagccagccacacggcgccctttgtgatccacgacatcgagacattgtggcaggcagagaaggggctggtgtggaagcagttggtgaatggcctgcctccctacaaggagatcagcgtgcacgtcttctaccgctgccagtgcaccacagtggagaccgtgcgggagctcactgagttcgccaagagcatccccagcttcagcagcctcttcctcaacgaccaggttacccttctcaagtatggcgtgcacgaggccatcttcgccatgctggcctctatcgtcaacaaggacgggctgctggtagccaacggcagtggctttgtcacccgtgagttcctgcgcagcctccgcaaacccttcagtgatatcattgagcctaagtttgaatttgctgtcaagttcaacgccctggaacttgatgacagtgacctggccctattcattgcggccatcattctgtgtggagaccggccaggcctcatgaacgttccacgggtggaggctatccaggacaccatcctgcgtgccctcgaattccacctgcaggccaaccaccctgatgcccagtacctcttccccaagctgctgcagaagatggctgacctgcggcaactggtcaccgagcacgcccagatgatgcagcggatcaagaagaccgaaaccgagacctcgctgcaccctctgctccaggagatctacaaggacatgtactaacggcggcacccaggcctccctgcagactccaatggggccagcactggaggggcccacccacatgacttttccattgaccagcccttgagcacccggcctggagcagcagagtcccacgatcgccctcagacacatgacacccacggcctctggctccctgtgccctctctcccgcttcctccagccagctctcttcctgtctttgttgtctccctctttctcagttcctctttcttttctaattcctgttgctctgtttcttcctttctgtaggtttctctcttcccttctcccttgccctccctttctctctccaccccccacgtctgtcctcctttcttattctgtgagatgttttgtattatttcaccagcagcatagaacaggacctctgcttttgcacaccttttccccaggagcagaagagagtggggcctgccctctgccccatcattgcacctgcaggcttaggtcctcacttctgtctcctgtcttcagagcaaaagacttgagccatccaaagaaacactaagctctctgggcctgggttccagggaaggctaagcatggcctggactgactgcagccccctatagtcatggggtccctgctgcaaaggacagtgggcaggaggccccaggctgagagccagatgcctccccaagactgtcattgcccctccgatgctgaggccacccactgacccaactgatcctgctccagcagcacacctcagccccactgacacccagtgtccttccatcttcacactggtttgccaggccaatgttgctgatggccccctgcactggccgctggacggcactctcccagcttggaagtaggcagggttccctccaggtgggcccccacctcactgaagaggagcaagtctcaagagaaggaggggggattggtggttggaggaagcagcacacccaattctgcccctaggactcggggtctgagtcctggggtcaggccagggagagctcggggcaggccttccgccagcactcccactgcccccctgcccagtagcagccgcccacattgtgtcagcatccagggccagggcctggcctcacatccccctgctcctttctctagctggctccacgggagttcaggccccactccccctgaagctgcccctccagcacacacacataagcactgaaatcactttacctgcaggctccatgcacctcccttccctccctgaggcaggtgagaacccagagagaggggcctgcaggtgagcaggcagggctgggccaggtctccggggaggcaggggtcctgcaggtcctggtgggtcagcccagcacctgctcccagtgggagcttcccgggataaactgagcctgttcattctgatgtccatttgtcccaatagctctactgccctccccttcccctttactcagcccagctggccacctagaagtctccctgcacagcctctagtgtccggggaccttgtgggaccagtcccacaccgctggtccctgccctcccctgctcccaggttgaggtgcgctcacctcagagcagggccaaagcacagctgggcatgccatgtctgagcggcgcagagccctccaggcctgcaggggcaaggggctggctggagtctcagagcacagaggtaggagaactggggttcaagcccaggcttcctgggtcctgcctggtcctccctcccaaggagccattctgtgtgtgactctgggtggaagtgcccagcccctgcccctacgggcgctgcagcctcccttccatgccccaggatcactctctgctggcaggattcttcccgctccccacctacccagctgatgggggttggggtgcttcctttcaggccaaggctatgaagggacagctgctgggacccacctccccctccccggccacatgccgcgtccctgccccgacccgggtctggtgctgaggatacagctcttctcagtgtctgaacaatctccaaaattgaaatgtatatttttgctaggagccccagcttcctgtgtttttaatataaatagtgtacacagactgacgaaactttaaataaatgggaattaaatatttaa

SEQ ID NO: 134 - DNA, 1258 bp, Homo sapiens
tccactcacagcctgaagcatacccggcaggggctgtccccaggcccaacaagcaaagggcccagtagcgagggccactggagcccatctccggggggctgggcaggaagtagggtggggtttggggtagggatctggtaccctgggactgctgcaactcaaactaaccaacccactgggagaagatgcctgggggtccaggagtcctccaagctctgcctgccaccatcttcctcctcttcctgctgtctgctgtctacctgggccctgggtgccaggccctgtggatgcacaaggtcccagcatcattgatggtgagcctgggggaagacgcccacttccaatgcccgcacaatagcagcaacaacgccaacgtcacctggtggcgcgtcctccatggcaactacacgtggccccctgagttcttgggcccgggcgaggaccccaatggtacgctgatcatccagaatgtgaacaagagccatgggggcatatacgtgtgccgggtccaggagggcaacgagtcataccagcagtcctgcggcacctacctccgcgtgcgccagccgccccccaggcccttcctggacatgggggagggcaccaagaaccgaatcatcacagccgaggggatcatcctcctgttctgcgcggtggtgcctgggacgctgctgctgttcaggaaacgatggcagaacgagaagctcgggttggatgccggggatgaatatgaagatgaaaacctttatgaaggcctgaacctggacgactgctccatgtatgaggacatctcccggggcctccagggcacctaccaggatgtgggcagcctcaacataggagatgtccagctggagaagccgtgacacccctactcctgccaggctgcccccgcctgctgtgcacccagctccagtgtctcagctcacttccctgggacattctcctttcagcccttctgggggcttccttagtcatattcccccagtggggggtgggagggtaacctcactcttctccaggccaggcctccttggactcccctgggggtgtcccactcttcttccctctaaactgccccacctcctaacctaatccccccgccccgctgcctttcccaggctcccctcaccccagcgggtaatgagcccttaatcgctgcctctaggggagctgattgtagcagcctcgttagtgtcaccccctcctccctgatctgtcagggccacttagtgataataaattcttcccaactgca

SEQ ID NO: 135 - DNA, 1762 bp, Homo sapiens
gacgtcatcggaggcgtggtcgtccccaaaattagggaggaagaggaaaaaaaaaagccagaaaaagttttcttttctggagtcccaaacgaggtgcgggacggaagagggggtgaaggccagaggctcggggcttcaagaccgctgtctggagtccccctttccaggccatgtcggggcccacctggctgcccccgaagcagccggagcccgccagagcccctcaggggagggcgatcccccgcggcaccccggggccaccaccggcccacggagcagcactccagccccaccccagggtcaatttttgcccccttccatctgagcagtgttaccaggccccagggggaccggaggatcgggggccggcgtgggtggggtcccatggagtactccagcacacgcaggggctccctgcagacagggggggccttcgccctggaagcctggacgccgagatagacttgctgagcagcacgctggccgagctgaatgggggtcggggtcatgcgtcacggcgaccagaccgacaggcatatgagcccccgccacctcctgcctaccgcacgggctccctgaagccaaatccagcctcgccgctcccagcgtctccctatgggggccccactccagcctcttacactaccgccagcaccccggctggcccagccttccccgtgcaagtgaaggtggcacagccagtgaggggctgcggcccacccaggcggggagcctctcaggcctctgggcccctcccgggcccccactttcctctcccaggccgaggtgaagtctgggggcctggctataggagccagagagagccagggccaggggccaaagaggaagctgctggggtctctggccctgcaggaagaggaagaggaggcgagcacgggccccaggtgcccctgagccagcctccagaggatgagctggataggctgacgaagaagctggttcacgacatgaaccacccgcccagcggggagtactttggccagtgtggtggctgcggagaagatgtggttggggatggggctggggttgtggcccttgatcgcgtctttcacgtgggctgctttgtatgttctacatgccgggcccagcttcgcggccagcatttctacgccgtggagaggagggcatattgcgagggctgctacgtggccaccctggagaaatgtgccacgtgctcccagcccatcctggaccggatcctgcgggctatggggaaggcctaccaccctggctgcttcacctgcgtggtgtgtcaccgcggcctcgacggcatccccttcacagtggatgctacgagccagatccactgcattgaggactttcacaggaagtttgccccaagatgctcagtgtgcggtggggccataatgcctgagccaggtcaggaggagactgtgagaattgttgctctggatcgaagttttcacattggctgttacaagtgcgaggagtgtgggctgctgctctcctctgagggcgagtgtcagggctgctacccgctggatgggcacatcttgtgcaaggcctgcagcgcctggcgcatccaggagctctcagccaccgtcaccactgactgctgagtcttcctagaagtacctgctgggttctcagttccagttcccatcctttgattgatcactctccctgacatccacctgtatgactttgtcaccaaatgctgtcttctctttctccaatcaagaaataataatccctcgagtttacaaaacaaaaaaaaaaa

SEQ ID NO: 136 - DNA, 964 bp, Homo sapiens
gagaacacaaagtaaaacttctgctgttcccagtcctgcagccccagcccagccgtcccccgcgggcgtggcaggtcctgagtcagggcctgtccgtggccagcatccctgctgggcgattgagcagcgggaagctgcttggacccagtctcaaacttaaccctcatctagcacccgggcaggcctcctgggttgcagggacttgagaaaaggcagagttctcaggtcctaggaagctggggcacgctggcgtgacaagcgtcccggagaaagccaagccctcggggagctggggaccgcagcagggctgcagtcacatcctgcgcgggtgggcggcgggccaggccttcagttgtttcgggacgcgccgagcttcgccgctcttccagcggctccgctgccagagctagcccgagcccggttctggggcgaaaatgcctgcccttcacatcgaagatttgccagagaaggaaaaactgaaaatggaagttgagcagcttcgcaaagaagtgaagttgcagagacaacaagtgtctaaatgttctgaagaaataaagaactatattgaagaacgttctggagaggatcctctagtaaagggaattccagaagacaagaacccctttaaagaaaaaggcagctgtgttatttcataaataacttgggagaaactgcatcctaagtggaagaactagtttgttttagttttcccagataaaaccaacatgctttttaaggaaggaagaatgaaattaaaaggagactttcttaagcaccatatagatagggttatgtataaaagcatatgtgctactcatctttgctcactatgcagtcttttttaagagagcagagagtatcagatgtacaattatggaaataagaacattacttgagcatgacacttctttcagtatattgcttgatgcttcaaataaagttttgtcttgggaaaaaaaaaaaa

SEQ ID NO: 137 - DNA, 3244 bp, Homo sapiens
gtgacgtcatctccgggcgccgagggtgactggacttgtggtgcgctgccagggctccgcagcgttgccggttgtattcgctggataccagagggcggaagtgcagcagggttcagctccgacctccgcgccggtgctttttgcggctgcgcgggcttcctggagtcctgctaccgcgtccccgcaggacagtgtgtcaggcgggcagcttgccccgccgccccaccggagcgcggaatctgggcgtccccaccagtgcggggagccggaaggaggagccatagcttggagtaggtttggctttggttgaaataagaatttagcctgtatgtactgctttaactcctggaagaatgacagatgacaaagatgtgcttcgagatgtgtggtttggacgaattccaacttgtttcacgctatatcaggatgagataactgaaagggaagcagaaccatactatttgcttttgccaagagtaagttatttgacgttggtaactgacaaagtgaaaaagcactttcagaaggttatgagacaagaagacattagtgagatatggtttgaatatgaaggcacaccactgaaatggcattatccaattggtttgctatttgatcttcttgcatcaagttcagctcttccttggaacatcacagtacattttaagagttttccagaaaaagaccttctgcactgtccatctaaggatgcaattgaagctcattttatgtcatgtatgaaagaagctgatgctttaaaacataaaagtcaagtaatcaatgaaatgcagaaaaaagatcacaagcaactctggatgggattgcaaaatgacagatttgaccagttttgggccatcaatcggaaactcatggaatatcctgcagaagaaaatggatttcgttatatcccctttagaatatatcagacaacgactgaaagacctttcattcagaagctgtttcgtcctgtggctgcagatggacagttgcacacactaggagatctcctcaaagaagtttgtccttctgctattgatcctgaagatggggaaaaaaagaatcaagtgatgattcatggaattgagccaatgttggaaacacctctgcagtggctgagtgaacatctgagctacccggataattttcttcatattagtatcatcccacagccaacagattgaaggatcaactatttgcctgaacagaatcatccttaaatgggatttatcagagcatgtcacccttttgcttcaatcaggtttggtggaggcaacctgaccagaaacacttcgctgctgcaagccagacaggaaaaagattccatgtcagataaggcaactgggctggtcttactttgcatcacctctgctttcctccactgccatcattaaacctcagctgtgacatgaaagacttaccggaccactgaaggtcttctgtaaaatataatgaagctgaaacctttggcctaagaagaaaatggaagtatgtgccactcgatttgtatttctgattaacaaataaacaggggtatttcctaaggtgaccatggttgaactttagctcatgaaagtggaaacattggtttaattttcaagagaattaagaaagtaaaagagaaattctgttatcaataacttgcaagtaattttttgtaaaagattgaattacagtaaacccatctttccttaacgaaaatttcctatgtttacagtctgtctattggtatgcaatcttgtaactttgataatgaacagtgagagatttttaaataaagcctctaaatatgttttgtcatttaataacatacagttttgtcacttttcaagtactttctgactcacatacagtagatcactttttactctgtgttaccattttgactggtcgtcattggcatggggtggatatagggcataggattacttgtctcagaagctgtcatagaatttcttgctgccaattaaaaaacctgtgttctttacacactacacgtataaatattgtaactgttcatctttgttgttttatcactgtaagcctgtcaaatcatagtatcctaagcatctgtaaatgctaattttgcatttttggaaaaacccattccttccaagctagtgtttttcattggctccaggtctaatttttcactgtggtccctggcagccagtcttttgaagtttaaagattacctgtctcttgactgcagtaccttttctttaatttttaccaaaaatatccagaggttactggagttcttattcaatataaggaaagtttgctgcactttattaccaagcctctgggattttaccagtcaaacatatttgtgcattacatttcatttcttgtgagctagctggctgtccatattgaatgttgacccatttgagtacgctaaaaggcttacagtatcagacacgatcatggttttagatcccataataaaaatgaatgtttttcttataaaaaattatacaaatgctgaagtgagattctactattgttcattgcttccttttctttttccttttgcgattttcactgattaatagcacatttcttcacaaaattagataaagttggtcaaagaccagatattctggaatggaaattgtaaagcttaatcaaaaagaatagccagtacagcatacaatctcagaaacttagaagcaagtagaaaataattggttgatgtaaacgaaagtgccattttagtaaaggcaggaaaaaaatagcaatatttgagttatgtaaggataaaaaatccactgacttgtatttttgcacaagaggctggtctgaatatgattgttcacattaagagtgtttattcgtcggttcattttggggattttcccccttgatgttttgacagattgaagtgagctttagtgagcaaaaggatcagaatgcagggaacactaagctgtgatgaagaaagtgtggtaaaaagccagagtagttttatacagacaaaaccagtgtcaggcctttgcagtaggcttgagtgaacttctgatctagatttgaaagtaaattttatgaagacattgcccatttttacttcctcattcattattgtaccagcatcatagctttattactctaatcccaggtaagtcaagcctacaatgccctagaggaagagtaaaaccagaaattcatgctggcttaaataatctatttttgtttcttttcatttgaatatttaaattttatggtttattaaaaaattaaataa

SEQ ID NO: 138 - DNA, 939 bp, Homo sapiens
gtggccggctgggatcagcctttaagatggcgtctcctcaggggggccagattgcgatcgcgatgaggcttcggaaccagctccagtcagtgtacaagatggacccgctacggaacgaggaggaggttcgagtgaagatcaaagacttgaatgaacacattgtttgctgcctatgcgccggctacttcgtggatgccaccaccatcacagagtgtcttcatactttctgcaagagttgtattgtgaagtacctccaaactagcaagtactgccccatgtgcaacattaagatccacgagacacagccactgctcaacctcaaactggaccgggtcatgcaggacatcgtgtataagctggtgcctggcttgcaagacagtgaagagaaacggattcgggaattctaccagtcccgaggtttggaccgggtcacccagcccactggggaagagccagcactgagcaacctcggcctccccttcagcagctttgaccactctaaagcccactactatcgctatgatgagcagttgaacctgtgcctggagcggctgagttctggcaaagacaagaataaaagcgtcctgcagaacaagtatgtccgatgttctgttagagctgaggtacgccatctccggagggtcctgtgtcaccgcttgatgctaaaccctcagcatgtgcagctcctttttgacaatgaagttctccctgatcacatgacaatgaagcagatatggctctcccgctggttcggcaagccatcccctttgcttttacaatacagtgtgaaagagaagaggaggtaggggccaagcccccaccccatcccactccccttccctccccagatatttatgtgaaatgaactgcagctttattttttgaaataaaaacttttaaaaagcaaaaaaaaaaaaaaaaaaaaaaaaaaaaaaaaaa

SEQ ID NO: 139 - DNA, 1229 bp, Homo sapiens
ctctcctcactcacccttcctggtgctttgggctctccttccttctcagacaagatgtcttatcagaaaaagcagcccacccctcagcccccagtggactgcgtgaagacctctggcggcggtggcggtggcggcggcagcggcggtggtggctgcggcttcttcggcggcggcggctcagggggcggtagcagcggttctggctgcggctactccggcggcggtggctactctggcggcggctgcggcgggggctcctccggcggcgggggcgggggcggcattggaggctgcggagggggctccggtgggagcgtcaagtactccggaggcggcggctcctccggcgggggctctggctgtttctccagcggtgggggcggctccggctgcttctcctccggtggcggcggctcctccgggggcggctccggctgcttctccagcggtgggggcggctcctccgggggcggctccggctgcttctcctccggcggcggcggcttctcgggccaggcggtccagtgccagagctacggaggcgtctctagcggcggctcctccgggggcggctccggctgcttctccagcggcgggggcggcggctctgtctgcggctactctggcggcggctctggctgcggcggaggctcctctggcggcagcggctccggctacgtctcctcgcagcaggtcactcagacctcgtgcgcgccccagccgagttacggaggggggtcgtccggcggcggcggcagcggcggaagcggctgcttctccagcggcgggggcggcgggagctccggctgcggcggcggctcctccgggattggcagcggctgcatcatcagtggcgggggctccgtctgcggaggtggttcctctggaggcggcggcggcggctcctccgtgggtggctccgggagtggcaagggcgtcccgatctgccaccagacccagcagaagcaggcgcctacctggccgtccaaatagatcccccagggtaccacggaggcgaaggagttggaggtgttttccaggggcaccgatgggcttagagctctcatgatgctacccgaggtttgcaaatccttcatgtcttaacctacctggaagaagccattgagctctccggctgcatctagttctgctgtttagcctctttggtttctgtacaactacctcccaaccccagtgcctcagtcaataaatttgcaaattcatgagaa

SEQ ID NO: 140 - DNA, 1646 bp, Homo sapiens
agcagtgcattgtgggaaactcccgagctctcctccgcgttcgcagccgccgtcatcccgcggaggagcgcgcagccccggggaggccggaggacgcgcccatagaatgcccaggggcgacaaactgtcctgagcccctctggtgcagccacctgcctgtcccatacgccccgcccaccatggagtccagagggaagtcagccagcagccccaagcccgacaccaaggtgccccaggtcaccaccgaggccaaggtacccccggcagccgatgggaaagcccccttgaccaagccctcgaagaaggaggccccggccgagaagcagcagccgccagcagcccccaccacggcacctgccaagaagacctcggccaaggccgaccctgcccttctcaacaaccacagcaacctgaagccagcccccacggtccccagcagtcccgatgcaaccccggagcccaagggtcctggggacggggcggaggaagatgaggctgccagtggggggcctgggggccgaggtccctggtcctgtgagaacttcaaccccctgctggtggctgggggtgtggccgtggcagccatagccctgattctcggtgtggccttcctggtccggaaaaaataatacctgggggccaggcggggggcacggagccacttcctgtacagacccgaggaagccagtgcatgcagagttcacccttacctattcgtacacacgcacattcattacacacctacatacgcccccaacacacgcgcacggtgaagaggacgcccgagcccacccctgctgacccaggacttccccaacctccagggcagaaagagcccaggctccggggtccacagcacaggatgtggggcgagggcacagctggggaacggcaagaaaggaatggaccctgtgtgtggccccccccacccctggcggctgggtgatcctgggcccccagggctggtctgagtgcaggtgggggtgccgggatgggttgggcctgggcccggccctcgtggggacattaaagggcgcggtggctccactcgccccatttctgctctttgcgtaccccccgggggtctgcctgggcgaatgcagtgggacggacctggggtgggcactcacctcagcagagcctcaatgccacctccccacaccacccaagcctagctgggtgggaagacggagccctgaagcctgcgtgtggagggggtgctgcccaagggtcgccttccccagcttgtgctccaggggagccccgacgccggcggggaggcagggatgtcgagggcccctcacagctgtgcccgccctgccccgctagactgcccctccagcttgcacccagcaccacctgagtctaaccagcgtataatgcaataacaggtagagtagaactgcttttggcggcgaccgtcacacactgtcctcagcccactgcacctggggaagcccctcgtgcagcccctccttagcacatccagtcccagcgtggcccttggcgcgcagcagcaggcgaactcccagaaggtggtggtgggcactgtgagaacgtggcctgccctcactggccagtggccacaggaaccccgggcctgagtggaggctgagtctgaaataaactctgtcgtctgaaggctg

SEQ ID NO: 141 - DNA, 884 bp, Homo sapiens
ccagctgggtgagcctgggagggaggaggtgagttgggctggactcagggaccgactcttcccgtctcatgactgtgtttactgggctggattttgggaaggggccagattgcatcagacagggcctgatgggctggagccagactgtggtctgaggaggagacacagccttataagctgagggagtggagaggcccggggccaggaaagcagagacagacaaagcgttaggagaagaagagaggcagggaagacaagccaggcacgatggccaccttcccaccagcaaccagcgccccccagcagcccccaggcccggaggacgaggactccagcctggatgaatctgacctctatagcctggcccattcctacctcggaggtggaggccggaaaggtcgcaccaagagagaagctgctgccaacaccaaccgccccagccctggcgggcacgagaggaaactggtgaccaagctgcagaattcagagaggaagaagcgaggggcacggcgctgagacagagctggagatgaggccagaccatggacactacacccagcaatagagacgggactgcggaggaaggaggacccaggacaggatccaggccggcttgccacaccccccacccctaggacttattcccgctgactgagtctctgaggggctaccaggaaagcgcctccaaccctagcaaaagtgcaagatggggagtgagaggctgggaatggaggggcagagccaggaagatcccccagaaaagaaagctacagaagaaactggggctcctccagggtggcagcaacaataaatagacacgcacggcagccacagcttgggtgtgtgttcatccttgttaaaaaaaaaaaaaaaaaaaaaaaaaa

SEQ ID NO: 142 - DNA, 1097 bp, Homo sapiens
tagaaggcagtcttgtgggtgcctcctcccccagccgcaactcaggtctgcagctgggtcctgcctccttccgagtgggccatggccggtacatggctgctacttctcctggcccttgggtgtccagccctacccacaggtgtgggcggcacaccctttccttctctggccccaccaatcatgctgctggtggatggaaagcagcagatggtggtggtctgcctggtccttgatgttgcaccccctggccttgacagccccatctggttctcagccggcaatggcagtgcactggatgccttcacctatggcccttccccagcaacggatggcacctggaccaacttggcccatctctccctgccttctgaggagctggcatcctgggagcctttggtctgccacactgggcctggggctgagggtcacagcaggagtacacagcccatgcatctgtcaggagaggcttctacagccaggacctgcccccaggagcctctcagggggacaccgggtggggcgctgtggctgggggtcctgcggctgctgctcttcaagctgctgctgtttgacctgctcctgacctgcagctgcctgtgcgaccccgcgggcccgctgccttcccccgcaaccaccacccgcctgcgagccctcggctcccatcgactgcacccggccacggagactgggggacgagaggccaccagctcacccagaccccagcctcgggaccgccgctggggtgacacccctccgggtcggaagcccgggagcccagtatggggggaagggtcttacctcagcagttaccccacttgcccagcacaggcctggtgctcaagatctgccctcagggctccttcctccagtcttggagcattttttgcaggtgacctgcctcctcctctgcaggctggagctgcctgagggcagggctctacctcccctgcgtcacactgtgtgaggctgtgtctctgccatccaaaagggggccccttgagaatggtgatccacccagttacaggggcatttagggagcagatgactgagaacattaaaaaagaacttaaatgacacagcaaaaaaaaaaaaaaaaa

SEQ ID NO: 143 - DNA, 6398 bp, Homo sapiens
gtggaatgacgggagggagtcccggcagctcctacctcccagcgatggcgtcgctgtgccgcgcccagtccccagcctgccggccggtactcaccgctacccggagttcgctcagacggtgagatttggggcgggtccgaggcagcggcgggacgctacctgcgaccgggaccatgaggagctgccagacccgtggggccggtaacgagagcagtcgcggcacctgctgagaggaaagagggagcggtccggcgcggctggggcgcggcagaggcttgcccgatcctcggccatgtcactgctctgcgtgcgcgttaaaagggccaaattccagggttcaccagataaatttaacacatatgtgaccctgaaagtacagaatgtgaagagcacaactgtagcagttcgtggtgatcagccttcctgggaacaggatttcatgtttgagattagtcgcctggacctgggtctaagtgtggaggtatggaacaaaggactgatctgggacaccatggtggggactgtgtggattgcgctgaagactattcgtcagtcggatgaggaagggcctggggaatggtccacattagaggcagagacgttaatgaaagacgatgagatctgtggaactagaaacccaactcctcataaaattttgcttgatacaagatttgagttgccttttgatatcccagaggaggaagccagatattggacctacaaatgggagcaaatcaatgccttgggagctgacaatgagtattctagtcaagaagaaagccagaggaagccattgcccactgctgccgcccagtgttcttttgaagaccctgatagtgccgtcgatgaccgagatagtgactatcgcagtgagaccagcaacagcttcccacctccttaccatacagcttcccagcccaacgcttctgtgcaccagttccctgtgccggtgcgatcgccacagcagctgctacttcaaggcagttcccgggactcttgtaatgactctatgcaaagttatgaccttgattatccagagcggcgggctatcagccccaccagcagcagtaggtatggctcctcctgtaatgtgagtcaaggaagctctcagctaagtgaactagaccagtatcacgaacaagatgacgaccatcgggagacggactcgattcattcttgccacagctctcacagcctgtccagagatggccaagcaggttttggagaacaagagaaacccttggaggtgacaggtcaagcagagaaggaggcagcatgtgaacccaaggagatgaaagaagatgccacaacccaccctcccccagatctggtgctgcaaaaagaccacttcctaggtccccaggagagttttcctgaggagaatgcatcttcaccatttacccaagccagagcacattggatccgagcagttaccaaggttcgactccagctgcaggagattccagatgatggtgacccctctctgcctcagtggctcccggaagggccagccggagggctctatggcattgacagcatgccagatttacgcagaaagaagccactgccacttgtcagtgatctgtcactggtccagtctcggaaggcaggaatcacttctgcaatggctacacgcacttctcttaaggacgaagagctgaaatcccacgtgtataagaaaaccctgcaggccttaatctaccccatttcgtgcaccactcctcataactttgaggtctggacggccactaccccaacctactgctatgagtgtgaaggcctgctctggggcattgcccggcagggcatgcgctgcagcgaatgtggagtcaagtgccatgagaagtgccaggatctgctcaatgctgactgcctgcagcgggctgcagaaaagagctgtaaacatggagctgaggaccggacccagaacattatcatggccatgaaggaccgcatgaagatccgagagcgaaataagccagagatctttgaagttatccgggacgtcttcacagtgaacaaagctgcccatgtgcagcagatgaaaacagtgaagcagagtgtactggatggcacctccaaatggtcagccaagatcaccattactgtggtgtgtgcccagggcctacaagccaaggacaaaacaggatccagtgacccttacgtgactgtgcaagtcagcaaaactaagaagcgtaccaagaccatttttggaaacttgaatcctgtttgggaggagaagttccattttgagtgccacaactcctctgaccgcattaaggtgcgtgtatgggatgaggatgatgacatcaagtcaagagtaaagcaacgcctaaagcgagagtctgatgatttccttggccaaaccatcattgaggttcggaccctaagtggcgagatggacgtctggtacaacttggagaagaggacagacaaatcagccgtctcaggggctatccgactacaaatcagtgtggagatcaagggggaggagaaagtagccccataccacgtgcagtatacatgtctccatgagaatcttttccattacctcacagacattcagggcagtggaggagtccgcatccctgaagctcgaggagacgatgcctggaaggtgtactttgatgagacagcccaagaaattgtggatgaatttgccatgcgttatggcattgagtccatatatcaggccatgacgcactttgcatgtttatcatccaagtacatgtgtcctggtgtgccagcagtgatgagcaccttactggccaacatcaacgcctactatgcccacacaactgcctctaccaatgtctctgcatctgatcgctttgcagcctccaactttgggaaagagagatttgtaaaactgctggaccagctacacaactcactgaggatcgacctctctacatacaggaataatttccctgctgggagtcctgaacggcttcaggacttaaaatccacagtggatttgctgaccagcattactttcttcagaatgaaggtacaagaactgcaaagccctccaagagccagccaggtggtaaaggattgtgtgaaggcctgtttgaactccacatatgaatatatcttcaacaactgccacgacttatacagccgccagtaccagctgaagcaggagctacctccagaggaacaagggcccagcattcggaacctggatttctggcccaagctcatcacactcatcgtgtcaatcatagaggaagataagaattcctacacacctgttctgaaccagtttcctcaggagttgaatgtgggaaaagtcagcgcagaagtgatgtggcatttgtttgcccaagacatgaaatatgcattggaggagcatgagaaagaccacctgtgtaaaagtgctgactacatgaacctgcacttcaaggtgaagtggctccacaatgaatacgtgcgggatctgcctgtcctccaggggcaggtgcctgagtacccagcgtggtttgagcagttcgtgctacaatggctggatgagaatgaggatgtatccctggaattcctgcgtggggccctggaacgagataagaaggatggattccagcagacatcagagcatgcactcttttcctgctctgtggtggatgtcttcacacaactcaatcagagctttgagatcatccggaagctggaatgcccagaccccagcatccttgcccactacatgaggaggtttgctaagaccatcgggaaggtgctgatgcagtatgcagacatcttgtcaaaggacttcccagcctattgcacaaaggagaaactgccctgcatcctgatgaacaacgtgcagcaactgagggtccagctggagaaaatgtttgaggccatgggaggcaaggagctggaccttgaagctgcagacagtctgaaggagctgcaggtgaaactgaatacggttctggatgagctcagcatggtgtttggaaacagtttccaggtacggattgatgagtgtgttcgacaaatggccgacatcctgggccaggttcggggcacagggaatgcatctccagacgccagggcctcagcggctcaggatgcagatagcgtactccggcctctcatggacttcctggatggcaacctcaccctctttgccactgtgtgtgagaagacggttctgaagcgtgtactgaaggagctctggcgcgtggtgatgaacacaatggagaggatgattgttctgcccccactcactgaccagacgggcacccagctgatcttcactgctgccaaggagctgagccatctttccaaactcaaggatcacatggtacgagaggaaacacggaatctcactccaaagcagtgtgcagtccttgacctcgccctggacaccatcaagcaatacttccatgcaggaggcaatgggctgaagaaaaccttcctggagaagagcccagatctgcagtctctacgctatgccctgtctctgtacacacagactactgacactctcatcaagacctttgtgcgctcgcagaccacccaagggtctggtgtggacgatcctgtgggagaagtctctattcaggtggacttgtttacacaccctggtactggggagcacaaggtcacagtgaaagtggtggctgccaatgacctcaagtggcagacagcgggtatgttccggcctttcgtggaggtgactatggttggcccacaccaaagtgataagaagaggaagttcacaaccaaatccaaaagcaacaactgggcccccaagtacaatgagacattccacttcctcctgggaaatgaggaggggcccgagtcctatgagttgcagatatgcgtgaaggattactgctttgcccgggaagatcgcgtgctagggctggctgtgatgcctctgagggatgtcacagccaagggcagctgtgcctgctggtgccccttgggccggaagatccatatggatgagacaggcctgaccattctccggattttatctcagaggagcaatgacgaggtggcccgagaatttgtgaaactcaaatcagagtctcgttccacggaggaggggagctgaacaccttcgactcctgtgccaatcaggcagcagcaatttcacaaatcagggccagtgggagttagctgtgtaaccggcttagggtctttgcagtcaagaggctgaccccttcagttaaagatatttaaggaaaaatttggggtggtgataatatggcttttcacagaaagggtcatgaagccctggcccaacaggactgtggtactaggggctgggatgtggggttaccacatggagagattttccattaagagagaaggacaaacatttctgagagtgtcagccattcttggtagacacctctccactcctcatcccacctctacccatctccatgccacaccttatccagttagacacatacataccaatcattagaagaacaagtttagaaggtgtggaacttgtgcctggctggctgggtagtcagctgagcctgttgctgagcccggtggtctggattggagtatggccagggcaggagtacacagaatagaatttagactgtcccttgagtagaatccactgattttctgtggctccagtgagaacaaggctttgaaactgaacaagataacttctagaaatgaactgtactaatccctttccccagattgtatcatgagtagaatcaggttcacgtggtgcttcaaagccctgagaagaatatttctttggaccccaggcactaggggccacctgcctgggagtctccctgcctcactcctctaggcaggggagtgatgcttcaggacgtgacaggctgttctaacatgtgtctacctgagggctagttgaaggatccaggagtattttcttcttgggtgggccctgaacaaagccaaaaattgtagaaaccagtctagaaaaagtcctgctcatctgtggccactgccttctagccgtcctccaccttgcagaaagaatctagcctttggtctctctctctctcatcggggtcatttgctattcccctctgatattcaaccctatagaaggagcctggactctgatccctctgtacaggctggatggaaggggccctccacacttcctgggaggtcagagacaaactgtttcagagagtcagatggacttcccaagacttgttgagagatgtgacatggttcttggatttcctctgtagcagcctcctggacttcctgaggactcgacattgtccacagatgtactggccattacatgaaacaagaaaccaagcatctttgctgttgttaattattatatgtgccattgttacaggagattataggctagtctgtaataaattatcttatagcaaaaaaaaaaaaaaaaaaaaaaaaaaaaa

SEQ ID NO: 144 - DNA, 5609 bp, Homo sapiens
gccgcgccgctccgctccggctcgggctccggctcgcctcgggctgggctcgggctccgggggcggcgtcccccgcgccgggccccgggacgggcggcgacgctccaaccatggcccgtgcccaggcgctcgtgctggcactcaccttccagctctgcgcgccggagaccgagactccggcagctggctgcaccttcgaggaggcaagtgacccagcagtgccctgcgagtacagccaggcccagtacgatgacttccagtgggagcaagtgcgaatccaccctggcacccgggcacctgcggacctgccccacggctcctacttgatggtcaacacttcccagcatgccccaggccagcgagcccatgtcatcttccagagcctgagcgagaatgatacccactgtgtgcagttcagctacttcctgtacagccgggacgggcacagcccgggcaccctgggcgtctacgtgcgcgttaatgggggccccctgggcagtgctgtgtggaatatgactggatcccacggccgtcagtggcaccaggctgagctggctgtcagcactttctggcccaatgaatatcaggtgctgtttgaggccctcatctccccagaccgcaggggctacatgggcctagatgacatcctgcttctcagctacccctgcgcaaaggccccacacttctcccgcctgggcgacgtggaggtcaacgcgggccagaacgcgtcgttccagtgcatggccgcgggcagagcggccgaggccgaacgcttcctcttgcaacggcagagcggggcgctggtgccggcggcgggcgtgcggcacatcagccaccggcgcttcctggccactttcccgctggctgccgtgagccgcgccgagcaggacctgtaccgctgtgtgtcccaggccccgcgcggcgcgggcgtctctaacttcgcggagctcatcgtcaaggagcccccaactcccatcgcgcccccacagctgctgcgtgctggccccacctacctcatcatccagctcaacaccaactccatcattggcgacgggccgatcgtgcgcaaggagattgagtaccgcatggcgcgcgggccctgggctgaggtgcacgccgtcagcctgcagacctacaagctgtggcacctcgaccccgacacagagtatgagatcagcgtgctgctcacgcgtcccggagacggcggcactggccgccctgggccacccctcatcagccgcaccaaatgcgcagagcccatgagggcccccaaaggcctggcttttgctgagatccaggcccgtcagctgaccctgcagtgggaaccactgggctacaacgtgacgcgttgccacacctatactgtgtcgctgtgctatcactacaccctgggcagcagccacaaccagaccatccgagagtgtgtgaagacagagcaaggtgtcagccgctacaccatcaagaacctgctgccctatcggaacgttcacgtgaggcttgtcctcactaaccctgaggggcgcaaagagggcaaggaggtcactttccagacggatgaggatgtgcccagtgggattgcagccgagtccctgaccttcactccactggaggacatgatcttcctcaagtgggaggagccccaggagcccaatggtctcatcacccagtatgagatcagctaccagagcatcgagtcatcagacccggcagtgaacgtgccaggcccacgacgtaccatctccaagctccgcaatgagacctaccatgtcttctccaacctgcacccaggcaccacctacctgttctccgtgcgggcccgcacaggcaaaggcttcggccaggcggcactcactgagataaccactaacatctctgctcccagctttgattatgccgacatgccgtcacccctgggcgagtctgagaacaccatcaccgtgctgctgaggccggcacagggccgcggtgcgcccatcagtgtgtaccaggtgattgtggaggaggagcgggcgcggaggctgcggcgggagccaggtggacaggactgcttcccagtgccattgaccttcgaggcggcgctggcccgaggcctggtgcactacttcggggccgaactggcggccagcagtctacctgaggccatgccctttaccgtgggtgacaaccagacctaccgaggcttctggaacccaccacttgagcctaggaaggcctatctcatctacttccaggcagcaagccacctgaagggggagacccggctgaattgcatccgcattgccaggaaagctgcctgcaaggaaagcaagcggcccctggaggtgtcccagagatcggaggagatggggcttatcctgggcatctgtgcaggggggcttgctgtcctcatccttctcctgggtgccatcattgtcatcatccgcaaagggagagaccactatgcctactcctactacccgaagccggtgaacatgaccaaggccaccgtcaactaccgccaggagaagacacacatgatgagcgccgtggaccgcagcttcacagaccagagcaccctgcaggaggacgagcggctgggcctgtccttcatggacacccatggctacagcacccggggagaccagcgcagcggtggggtcactgaggccagcagcctcctggggggctccccgaggcgtccctgtggccggaagggctccccataccacacggggcagctgcaccctgcggtgcgtgtcgcagaccttctgcagcacatcaaccagatgaagacggccgagggttacggcttcaagcaggagtatgagagcttctttgaaggctgggacgccacaaagaagaaagacaaggtcaagggcagccggcaggagccaatgcctgcctatgatcggcaccgagtgaaactgcacccgatgctgggagaccccaatgccgactacattaatgccaactacatagatggttaccacaggtcaaaccacttcatagccactcaagggccgaagcctgagatggtctatgacttctggcgtatggtgtggcaggagcactgttccagcatcgtcatgatcaccaagctggtcgaggtgggcagggtgaaatgctcacggtactggccggaggactcagacacctacggggacatcaagattatgctggtgaagacagagaccctggctgagtatgtcgtgcgcacttttgccctggagcggagaggctactctgcccggcacgaggtccgccagttccacttcacagcgtggccagagcatggcgtcccctaccatgccacggggctgctggctttcatccggcgcgtgaaggcctccaccccacctgatgccgggcccattgtcatccactgcagcgcgggcaccggccgcacaggttgctatatcgtcctggatgtgatgctggacatggcagagtgtgagggcgtcgtggacatttacaactgtgtgaagactctctgctcccggcgtgtcaacatgatccagactgaggagcagtacatcttcattcatgatgcaatcctggaggcctgcctgtgtggggagaccaccatccctgtcagtgagttcaaggccacctacaaggagatgatccgcattgatcctcagagtaattcctcccagctgcgggaagagttccagacgctgaactcggtcaccccgccgctggacgtggaggagtgcagcatcgccctgttgccccggaaccgcgacaagaaccgcagcatggacgtcctgccgcccgaccgctgcctgcccttcctcatctccactgatggggactccaacaactacattaatgcagccctgactgacagctacacacggagtgcggccttcatcgtgaccctgcacccgctgcagagcaccacgcccgacttctggcggctggtctacgattacgggtgcacctccatcgtcatgctcaaccagctgaaccagtccaactccgcctggccctgcctgcagtactggccagagccaggccggcagcaatatggcctcatggaggtggagtttatgtcgggcacagctgatgaagacttagtggctcgagtcttccgggtgcagaacatctctcggttgcaggaggggcacctgctggtgcggcacttccagttcctgcgctggtctgcataccgggacacacctgactccaagaaggccttcttgcacctgctggctgaggtggacaagtggcaggccgagagtggggatgggcgcaccatcgtgcactgcctaaacgggggaggacgcagcggcaccttctgcgcctgcgccacggtcctggagatgatccgctgccacaacttggtggacgttttctttgctgccaaaaccctccggaactacaaacccaacatggtggagaccatggatcagtaccacttttgctacgatgtggccctggagtacttggaggggctggagtcaagatagcggggccctggcctggggcacccactgcacactcagggccagacccaccatcctggactggcgaggaagatcagtgcctcctgctctgcccaaacacactcccatggggcaagcactggagtggatgctgggctatcttgctcccccttccactgtgggcagggcctttcgcttgtcccatgggcgggtggtgggccaaggaggagcttagcaagtctgcagcccagccccacctccatagggtcctgcaggcctgtgctgagaggcctggtgctgcctggcagagtgacaaaggctcaggacggctggctctgggggactcaggccaagccccttggcaccatcctggcttttggcagggatgagtgaggccctgcagagagcatcccaggccaaggttcccactcagcctgccccctctgcatgtgggtagaggatgtactgggacttggcatttaggattccatctggcccagcccctgaaggtcctggggaagcaggtctcaattctgaatagccagtggggcacactgactgtcctccccaggggaactgcagcgccctcctccccactgccccctgcagcccctgagatattttgctcactatccctccccacttgcttccctgatatgtgctctgagcttccctgaaccaggatctgcctattactgctgtgccccatggggggctccttccctgcctgacccactgttgcagaatgaagtcacctcgcccccctcttcctttaatcttcaggcctcactggcctgtcctgctcagcttgggccagtgacaatctgcaaggctgaacaacagcccctggggttgaggcccctgtggctcctggtcaggctgcccgttgtggggaggggcagtgttagagcagggctggtcataccctctggagttcagaggaagaggtaggaccagtgcttttttgtttcttttgttatttttggttgggtgggtgggaaggtctctttaaaatggggcaggccacacccccattccgtgcctcaatttccccatctgtaaactgtagatatgactactgacctacctcgcagggggctgtggggaggcataagctgatgtttgtaaagcgctttgtaaataaacgtgctctctgaatgccacagaaaaaaaaaaaaaaaa

SEQ ID NO: 145 - DNA, 2281 bp, Homo sapiens
gaattccgaatcatgtgcagaatgctgaatcttcccccagccaggacgaataagacagcgcggaaaagcagattctcgtaattctggaattgcatgttgcaaggagtctcctggatcttcgcacccagcttcgggtagggagggagtccgggtcccgggctaggccagcccggcaggtggagagggtccccggcagccccgcgcgcccctggccatgtctttaatgccctgccccttcatgtggccttctgagggttcccagggctggccagggttgtttcccacccgcgcgcgcgctctcacccccagccaaacccacctggcagggctccctccagccgagaccttttgattcccggctcccgcgctcccgcctccgcgccagcccgggaggtggccctggacagccggacctcgcccggccccggctgggaccatggtgtttctctcgggaaatgcttccgacagctccaactgcacccaaccgccggcaccggtgaacatttccaaggccattctgctcggggtgatcttggggggcctcattcttttcggggtgctgggtaacatcctagtgatcctctccgtagcctgtcaccgacacctgcactcagtcacgcactactacatcgtcaacctggcggtggccgacctcctgctcacctccacggtgctgcccttctccgccatcttcgaggtcctaggctactgggccttcggcagggtcttctgcaacatctgggcggcagtggatgtgctgtgctgcaccgcgtccatcatgggcctctgcatcatctccatcgaccgctacatcggcgtgagctacccgctgcgctacccaaccatcgtcacccagaggaggggtctcatggctctgctctgcgtctgggcactctccctggtcatatccattggacccctgttcggctggaggcagccggcccccgaggacgagaccatctgccagatcaacgaggagccgggctacgtgctcttctcagcgctgggctccttctacctgcctctggccatcatcctggtcatgtactgccgcgtctacgtggtggccaagagggagagccggggcctcaagtctggcctcaagaccgacaagtcggactcggagcaagtgacgctccgcatccatcggaaaaacgccccggcaggaggcagcgggatggccagcgccaagaccaagacgcacttctcagtgaggctcctcaagttctcccgggagaagaaagcggccaaaacgctgggcatcgtggtcggctgcttcgtcctctgctggctgccttttttcttagtcatgcccattgggtctttcttccctgatttcaagccctctgaaacagtttttaaaatagtattttggctcggatatctaaacagctgcatcaaccccatcatatacccatgctccagccaagagttcaaaaaggcctttcagaatgtcttgagaatccagtgtctctgcagaaagcagtcttccaaacatgccctgggctacaccctgcacccgcccagccaggccgtggaagggcaacacaaggacatggtgcgcatccccgtgggatcaagagagaccttctacaggatctccaagacggatggcgtttgtgaatggaaatttttctcttccatgccccgtggatctgccaggattacagtgtccaaagaccaatcctcctgtaccacagcccgggtgagaagtaaaagctttttgcaggtctgctgctgtgtagggccctcaacccccagccttgacaagaaccatcaagttccaaccattaaggtccacaccatctccctcagtgagaacggggaggaagtctaggacaggaaagatgcagaggaaaggggaataatcttaggtacccaccccacttccttctcggaaggccagctcttcttggaggacaagacaggaccaatcaaagaggggacctgctgggaatggggtgggtggtagacccaactcatcaggcagcgggtagggcacagggaagagggagggtgtctcacaaccaaccagttcagaatgatacggaacagcatttccctgcagctaatgctttcttggtcactctgtgcccacttcaacgaaaaccaccatgggaaacagaatttcatgcacaatccaaaagactataaatataggattatgatttcatcatgaatattttgagcacacactctaagtttggagctatttcttgatggaagtgaggggattttattttcaggctcaacctactgacagccacatttgacatttatg

SEQ ID NO: 146 - DNA, 2600 bp, Homo sapiens
aaatccgagcctcgcgtgggctcctggcccccgacggacaccaccaggcccacggagcccaccatgccgcgcccggcccccgcgcgccgcctcccgggactcctcctgctgctctggccgctgctgctgctgccctccgccgcccccgaccccgtggcccgcccgggcttccggaggctggagacccgaggtcccgggggcagccctggacgccgcccctctcctgcggctcccgacggcgcgcccgcttccgggaccagcgagcctggccgcgcccgcggtgcaggtgtttgcaagagcagacccttggacctggtgtttatcattgatagttctcgtagcgtacggcccctggaattcaccaaagtgaaaacttttgtctcccggataatcgacactctggacattgggccagccgacacgcgggtggcagtggtgaactatgctagcactgtgaagatcgagttccaactccaggcctacacagataagcagtccctgaagcaggccgtgggtcgaatcacacccttgtcaacaggcaccatgtcaggcctagccatccagacagcaatggacgaagccttcacagtggaggcaggggctcgagagccctcttctaacatccctaaggtggccatcattgttacagatgggaggccccaggaccaggtgaatgaggtggcggctcgggcccaagcatctggtattgagctctatgctgtgggcgtggaccgggcagacatggcgtccctcaagatgatggccagtgagcccctagaggagcatgttttctacgtggagacctatggggtcattgagaaactttcctctagattccaggaaaccttctgtgcgctggacccctgtgtgcttggaacacaccagtgccagcacgtctgcatcagtgatggggaaggcaagcaccactgtgagtgtagccaaggatacaccttgaatgccgacaagaaaacgtgttcagctcttgataggtgtgctcttaacacccacggatgtgagcacatctgtgtgaatgacagaagtggctcttatcattgtgagtgctatgaaggttataccttgaatgaagacaggaaaacttgttcagctcaagataaatgtgctttgggtacccatgggtgtcagcacatttgtgtgaatgacagaacagggtcccatcattgtgaatgctatgagggctacactctgaatgcagataaaaaaacatgttcagtccgtgacaagtgtgccctaggctctcatggttgccagcacatttgtgtgagtgatggggccgcatcctaccactgtgattgctatcctggctacaccttaaatgaggacaagaaaacatgttcagccactgaggaagcacgaagacttgtttccactgaagatgcttgtggatgtgaagctacactggcattccaggacaaggtcagctcgtatcttcaaagactgaacactaaacttgatgacattttggagaagttgaaaataaatgaatatggacaaatacatcgttaaattgctccaatttctcacctgaaaatgtggacagcttggtgtacttaatactcatgcattcttttgcacacctgttattgccaatgttcctgctaataatttgccattatctgtattaatgcttgaatattactggataaattgtatgaagatcttctgcagaatcagcatgattcttccaaggaaatacatatgcagatacttattaagagcaaactttagtgtctctaagttatgactgtgaaatgattggtaggaaatagaatgaaaagtttagtgtttctttatctactaattgagccatttaatttttaaatgtttatattagataaccatattcacaatggaaactttaggtctagtttcttttgatagtatttataatataaatcaatcttattactgagagtgcaaattgtacaaggtatttacacatacaacttcatataactgagatgaatgtaattttgaactgtttaacactttttgttttttgcttattttgttggagtattattgaagatgtgatcaatagattgtaatacacatatctaaaaatagttaacacagatcaagtgaacattacattgccatttttaattcattctggtctttgaaagaaatgtactactaaagagcactagttgtgaatttagggtgttaaactttttaccaagtacaaaaatcccaaattcactttattattttgcttcaggatccaagtgacaaagttatatatttataaaattgctataaatcgacaaaatctaatgttgtctttttaatgttagtgatccacctgcctcagcctcccaaagtgctgggattacaggcttgaaagtctaacttttttttacttatatatttgatacatataattcttttggctttgaaacttgcaactttgagaacaaaacagtcctttaaattttgcactgctcaattctgtttttcgtttgcattgtctttaatataataaaagttattacctttacatattatcatgtctatttttgatgactcatcaattttgtctattaaagatatttctttaaattaaaaaaaaaaaaaaaaaa

SEQ ID NO: 147 - DNA, 1353 bp, Homo sapiens
accagggggcggggcctgcccggctggcctggacgaacgggaagccgggagctcggccacgggtggcgaggctgcggtgaggcctggtctccggctgccagaccatgctgagtggagcacgctgcaggctcgcctcagcgctgcggggaacgcgcgcgccgccgtccgcggtcgcccgtaggtgcctgcacgcgtcggggtcgcggcctttggccgaccggggcaagaagactgaggagccgccccgcgacttcgatccggcgctgctggagttcctggtgtgcccgctctccaagaagccgctcagatatgaagcatcaacaaacgaattgattaatgaagagttgggaatagcttatccaatcattgatgggatccctaatatgataccacaggcagctaggatgacacgtcaaagtaagaagcaagaagaagtggagcagcgctagttcataatttaaaaaaattaaaaaaacgcaacagccaacttttcttaataccatataccttttaaaacacagtggcaggtaataagtggaagagaagaatgtttctgtctcttcctacgttgactgttcttattccactggtttctttagcaggactgttctactcagcctctgtggaagaaaacttcccacagggctgcactagcacagccagcctttgcttttacagcctgctcttgcctattaccataccagtgtatgtattcttccacctttggacttggatgggtattaaactcttcaggcataattgatgcaactagagtcaatatgctgtatatattaatgatagctcttgggcatcgatctctgaaagctcaaatggatggaatttagtttgcgggaaagaggctttgctttgcgcatatcaggcttaggactgtgggaggcttaagttgcagatgcttcttttattgtactcttgttctgcccttgttttttgaaggctctgacttataactgctgtatcagaagaaacattttgacagtgtcttggttggagatgaacatccctaattgacatgtgatgactatttcttattccattcatctaagagtcattgaaattttgttttgcttgtttgtttagcttcaaggtctttggtaaagtcacatgttaaggatgactgaaataattccaaaggagtgatgttggaatagtccctctaagggagagaaatgcatttgaacgaatgtgatataaaaccacataatcaaatagaaacttcatgtacttacaaaaactgagtttgtaaaattaccttcatttctttgacattaaatgcttatattagcaataaacatgttgacactttcctataaaaaataaaccagtttgcagtag

SEQ ID NO: 148 - DNA, 2342 bp, Homo sapiens
cttgggcaggagggaccttcgatcctcggggagcccaggagaccagaacatgaactccttcaattataccacccctgattatgggcactatgatgacaaggataccctggacctcaacacccctgtggataaaacttctaacacgctgcgtgttccagacatcctggccttggtcatctttgcagtcgtcttcctggtgggagtgctgggcaatgccctggtggtctgggtgacggcattcgaggccaagcggaccatcaatgccatctggttcctcaacttggcggtagccgacttcctctcctgcctggcgctgcccatcttgttcacgtccattgtacagcatcaccactggccctttggcggggccgcctgcagcatcctgccctccctcatcctgctcaacatgtacgccagcatcctgctcctggccaccatcagcgccgaccgctttctgctggtgtttaaacccatctggtgccagaacttccgaggggccggcttggcctggatcgcctgtgccgtggcttggggtttagccctgctgctgaccataccctccttcctgtaccgggtggtccgggaggagtactttccaccaaaggtgttgtgtggcgtggactacagccacgacaaacggcgggagcgagccgtggccatcgtccggctggtcctgggcttcctgtggcctctactcacgctcacgatttgttacactttcatcctgctccggacgtggagccgcagggccacgcggtccaccaagacactcaaggtggtggtggcagtggtggccagtttctttatcttctggttgccctaccaggtgacggggataatgatgtccttcctggagccatcgtcacccaccttcctgctgctgaataagctggactccctgtgtgtctcctttgcctacatcaactgctgcatcaaccccatcatctacgtggtggccggccagggcttccagggccgactgcggaaatccctccccagcctcctccggaacgtgttgactgaagagtccgtggttagggagagcaagtcattcacgcgctccacagtggacactatggcccagaagacccaggcagtgtaggcgacagcctcatgggccactgtggcccgatgtccccttccttcccggccattctccctcttgttttcacttcacttttcgtgggatggtgttaccttagctaactaactctcctccatgttgcctgtctttcccagacttgtccctccttttccagcgggactcttctcatccttcctcatttgcaaggtgaacacttccttctagggagcaccctcccaccccccaccccccccacacacaccatctttccatcccaggcttttgaaaaacaaacagaaacccgtgtatctgggatatttccatatggcaataggtgtgaacagggaactcagaatacagacaagtagaaagattctcgcttaaaaaaaatgtatttattttatggcaagttggaaaatatgtaactggaatctcaaaagttctttgggacaaaacagaagtccatggagttatctaagctcttgtaagtgagttaatttaaaaaagaaaattaggctgagagcagtggctcacgcctgtaatcccagaactttgggaggctaaggtgggtggatcacctgaggtcaagagttccagaccaggctggccagcatggtgaaaccccgtctgtactaaaaatacaaaaaattaactgggcatggtagtgggtgcctgtaatcccagctacttgggaggctgaggtgggagaattgctcgaacttggaggtggaggttgtggtgagccatgatcgcaccactgcactctagcctgggtgaccgagggaggctctgtctcaaaagcaaagcaaaaacaaaaacaaaaacacctaaaaaacctgcagttttgtttgtactttgtttttaaattatgctttctattttgagatcattgcaaactcaacacaattgtaagtaatgatacagagggatcttgtgtacccttcacccagcctcccccaatggcaacatcttgcaaaactacaatgtagtctcataaccaggatattgacattgatacagtgaagatacaggacattctcatcaccacagggatccccaggatgcccacttccctccacccccacaccccagccgtgtccctaacccctggcaaccaggaatccactctccatttctataatgttgtcatttcaagaatgttattcaatggaatcatatagtatgtaacctgttttgagcttaaaaaaaaagtatacatgactttaatgaggaaaataaaaatgaatattgaaatgtt

SEQ ID NO: 149 - DNA, 2745 bp, Homo sapiens
ctcgcgaggccggctaggcccgaatgtcgttagccgtggggaaagatggcggaaaatttaaaaggctgcagcgtgtgttgcaagtcttcttggaatcagctgcaggacctgtgccgcctggccaagctctcctgccctgccctcggtatctctaagaggaacctctatgactttgaagtcgagtacctgtgcgattacaagaagatccgcgaacaggaatattacctggtgaaatggcgtggatatccagactcagagagcacctgggagccacggcagaatctcaagtgtgtgcgtatcctcaagcagttccacaaggacttagaaagggagctgctccggcggcaccaccggtcaaagaccccccggcacctggacccaagcttggccaactacctggtgcagaaggccaagcagaggcgggcgctccgtcgctgggagcaggagctcaatgccaagcgcagccatctgggacgcatcactgtagagaatgaggtggacctggacggccctccgcgggccttcgtgtacatcaatgagtaccgtgttggtgagggcatcaccctcaaccaggtggctgtgggctgcgagtgccaggactgtctgtgggcacccactggaggctgctgcccgggggcgtcactgcacaagtttgcctacaatgaccagggccaggtgcggcttcgagccgggctgcccatctacgagtgcaactcccgctgccgctgcggctatgactgcccaaatcgtgtggtacagaagggtatccgatatgacctctgcatcttccgcacggatgatgggcgtggctggggcgtccgcaccctggagaagattcgcaagaacagcttcgtcatggagtacgtgggagagatcattacctcagaggaggcagagcggcggggccagatctacgaccgtcagggcgccacctacctctttgacctggactacgtggaggacgtgtacaccgtggatgccgcctactatggcaacatctcccactttgtcaaccacagttgtgaccccaacctgcaggtgtacaacgtcttcatagacaaccttgacgagcggctgccccgcatcgctttctttgccacaagaaccatccgggcaggcgaggagctcacctttgattacaacatgcaagtggaccccgtggacatggagagcacccgcatggactccaactttggcctggctgggctccctggctcccctaagaagcgggtccgtattgaatgcaagtgtgggactgagtcctgccgcaaatacctcttctagcccttagaagtctgaggccagactgactgagggggcctgaagctacatgcacctcccccactgctgccctcctgtcgagaatgactgccagggcctcgcctgcctccacctgcccccacctgctcctacctgctctacgttcagggctgtggccgtggtgaggaccgactccaggagtcccctttccctgtcccagccccatctgtgggttgcacttacaaacccccacccaccttcagaaatagtttttcaacatcaagactctctgtcgttgggattcatggcctattaaggaggtccaaggggtgagtcccaacccagccccagaatatatttgtttttgcacctgcttctgcctggagattgaggggtctgctgcaggcctcctccctgctgccccaaaggtatggggaagcaaccccagagcaggcagacatcagaggccagagtgcctagcccgacatgaagctggttccccaaccacagaaactttgtactagtgaaagaaagggggtccctgggctacgggctgaggctggtttctgctcgtgcttacagtgctgggtagtgttggccctaagagctgtagggtctcttcttcagggctgcatatctgagaagtggatgcccacatgccactggaagggaagtgggtgtccatgggccactgagcagtgagaggaaggcagtgcagagctggccagccctggaggtaggctgggaccaagctctgccttcacagtgcagtgaaggtacctagggctcttgggagctctgcggttgctaggggccctgacctggggtgtcatgaccgctgacaccactcagagctggaaccaagatctagatagtccgtagatagcacttaggacaagaatgtgcattgatggggtggtgatgaggtgccaggcactgggtagagcacctggtccacgtggattgtctcagggaagccttgaaaaccacggaggtggatgccaggaaagggcccatgtggcagaaggcaaagtacaggccaagaattgggggtgggggagatggcttccccactatgggatgacgaggcgagagggaagcccttgctgcctgccattcccagaccccagccctttgtgctcaccctggttccactggtctcaaaagtcacctgcctacaaatgtacaaaaggcgaaggttctgatggctgccttgctccttgctcccccaccccctgtgaggacttctctaggaagtccttcctgactacctgtgcccagagtgcccctacatgagactgtatgccctgctatcagatgccagatctatgtgtctgtctgtgtgtccatcccgccgaccccccagactaacctccaggcatggactgaatctggttctcctcttgtacacccctcaaccctatgcagcctggagtgggcatcaataaaatgaactgtcgactgaacaaaaaaaaaaaaaaaaaa

SEQ ID NO: 150 - DNA, 2429 bp, Homo sapiens
ccggcgggggcgccgcggagagcggagggcgccgggctgcggaacgcgaagcggagggcgcgggaccctgcacgccgcccgcgggcccatgtgagcgccatgcggcgccgcgcagcccggggacccggcccgccgcccccagggcccggactctcgcggctgccgctgccgctgctgctgctgctggcgctggggacccgcgggggctgcgccgcgcccgcacccgcgccgcgcgccgaggacctcagcctgggagtggagtggctaagcaggttcggttacctgcccccggctgaccccacaacagggcagctgcagacgcaagaggagctgtctaaggccatcacagccatgcagcagtttggtggcctggaggccaccggcatcctggacgaggccaccctggccctgatgaaaaccccacgctgctccctgccagacctccctgtcctgacccaggctcgcaggagacgccaggctccagcccccaccaagtggaacaagaggaacctgtcgtggagggtccggacgttcccacgggactcaccactggggcacgacacggtgcgtgcactcatgtactacgccctcaaggtctggagcgacattgcgcccctgaacttccacgaggtggcgggcagcgccgccgacatccagatcgacttctccaaggccgaccataacgacggctaccccttcgacggccccggcggcaccgtggcccacgccttcttccccggccaccaccacaccgccggggacacccactttgacgatgacgaggcctggaccttccgctcctcggatgcccacgggatggacctgtttgcagtggctgtccacgagtttggccacgccattgggttaagccatgtggccgctgcacactccatcatgcggccgtactaccagggcccggtgggtgacccgctgcgctacgggctcccctacgaggacaaggtgcgcgtctggcagctgtacggtgtgcgggagtctgtgtctcccacggcgcagcccgaggagcctcccctgctgccggagcccccagacaaccggtccagcgccccgcccaggaaggacgtgccccacagatgcagcactcactttgacgcggtggcccagatccggggtgaagctttcttcttcaaaggcaagtacttctggcggctgacgcgggaccggcacctggtgtccctgcagccggcacagatgcaccgcttctggcggggcctgccgctgcacctggacagcgtggacgccgtgtacgagcgcaccagcgaccacaagatcgtcttctttaaaggagacaggtactgggtgttcaaggacaataacgtagaggaaggatacccgcgccccgtctccgacttcagcctcccgcctggcggcatcgacgctgccttctcctgggcccacaatgacaggacttatttctttaaggaccagctgtactggcgctacgatgaccacacgaggcacatggaccccggctaccccgcccagagccccctgtggaggggtgtccccagcacgctggacgacgccatgcgctggtccgacggtgcctcctacttcttccgtggccaggagtactggaaagtgctggatggcgagctggaggtggcacccgggtacccacagtccacggcccgggactggctggtgtgtggagactcacaggccgatggatctgtggctgcgggcgtggacgcggcagaggggccccgcgcccctccaggacaacatgaccagagccgctcggaggacggttacgaggtctgctcatgcacctctggggcatcctctcccccgggggccccaggcccactggtggctgccaccatgctgctgctgctgccgccactgtcaccaggcgccctgtggacagcggcccaggccctgacgctatgacacacagcgcgagcccatgagaggacagaggcggtgggacagcctggccacagagggcaaggactgtgccggagtccctgggggaggtgctggcgcgggatgaggacgggccaccctggcaccggaaggccagcagagggcactgcccgccagggctgggcaggctcaggtggcaaggacggagctgtcccctagtgagggactgtgttgactgacgagccgaggggtggccgctccagaagggtgcccagtcaggccgcaccgccgccagcctcctccggccctggagggagcatctcgggctgggggcccacccctctctgtgccggcgccaccaaccccacccacactgctgcctggtgctcccgccggcccacagggcctccgtccccaggtccccagtggggcagccctccccacagacgagccccccacatggtgccgcggcacgtcccccctgtgacgcgttccagaccaacatgacctctccctgctttgtaaaaaaaaaaaaaaaaaaa

SEQ ID NO: 151 - DNA, 3949 bp, Homo sapiens
ggcccaagtgaatagtcctcgcgcaagcgggacactgtggtggatgcaattcccctcgcctccagccgcgaggagctccccggcgccgcaggcagcgtcctcctccgaagcagctgcacctgcaactgggcagcctggaccctcgtgccctgttcccgggacctcgcgcagggggcgccccgggacaccccctgcgggccgggtggaggaggaagaggaggaggaggaagaagacgtggacaaggacccccatcctacccagaacacctgcctgcgctgccgccacttctctttaagggagaggaaaagagagcctaggagaaccatggggggctgcgaagtccgggaatttcttttgcaatttggtttcttcttgcctctgctgacagcgtggccaggcgactgcagtcacgtctccaacaaccaagttgtgttgcttgatacaacaactgtactgggagagctaggatggaaaacatatccattaaatgggtgggatgccatcactgaaatggatgaacataataggcccattcacacataccaggtatgtaatgtaatggaaccaaaccaaaacaactggcttcgtacaaactggatctcccgtgatgcagctcagaaaatttatgtggaaatgaaattcacactaagggattgtaacagcatcccatgggtcttggggacttgcaaagaaacatttaatctgttttatatggaatcagatgagtcccacggaattaaattcaagccaaaccagtatacaaagatcgacacaattgctgctgatgagagttttacccagatggatttgggtgatcgcatcctcaaactcaacactgaaattcgtgaggtggggcctatagaaaggaaaggattttatctggcttttcaagacattggggcgtgcattgccctggtttcagtccgtgttttctacaagaaatgccccttcactgttcgtaacttggccatgtttcctgataccattccaagggttgattcctcctctttggttgaagtacggggttcttgtgtgaagagtgctgaagagcgtgacactcctaaactgtattgtggagctgatggagattggctggttcctcttggaaggtgcatctgcagtacaggatatgaagaaattgagggttcttgccatgcttgcagaccaggattctataaagcttttgctgggaacacaaaatgttctaaatgtcctccacacagtttaacatacatggaagcaacttctgtctgtcagtgtgaaaagggttatttccgagctgaaaaagacccaccttctatggcatgtaccaggccaccttcagctcctaggaatgtggtttttaacatcaatgaaacagcccttattttggaatggagcccaccaagtgacacaggagggagaaaagatctcacatacagtgtaatctgtaagaaatgtggcttagacaccagccagtgtgaggactgtggtggaggactccgcttcatcccaagacatacaggcctgatcaacaattccgtgatagtacttgactttgtgtctcacgtgaattacacctttgaaatagaagcaatgaatggagtttctgagttgagtttttctcccaagccattcacagctattacagtgaccacggatcaagatgcaccttccctgataggtgtggtaaggaaggactgggcatcccaaaatagcattgccctatcatggcaagcacctgctttttccaatggagccattctggactacgagatcaagtactatgagaaagaacatgagcagctgacctactcttccacaaggtccaaagcccccagtgtcatcatcacaggtcttaagccagccaccaaatatgtatttcacatccgagtgagaactgcgacaggatacagtggctacagtcagaaatttgaatttgaaacaggagatgaaacttctgacatggcagcagaacaaggacagattctcgtgatagccaccgccgctgttggcggattcactctcctcgtcatcctcactttattcttcttgatcactgggagatgtcagtggtacataaaagccaagatgaagtcagaagagaagagaagaaaccacttacagaatgggcatttgcgcttcccgggaattaaaacttacattgatccagatacatatgaagacccatccctagcagtccatgaatttgcaaaggagattgatccctcaagaattcgtattgagagagtcattggggcaggtgaatttggagaagtctgtagtgggcgtttgaagacaccagggaaaagagagatcccagttgccattaaaactttgaaaggtggccacatggatcggcaaagaagagattttctaagagaagctagtatcatgggccagtttgaccatccaaacatcattcgcctagaaggggttgtcaccaaaagatccttcccggccattggggtggaggcgttttgccccagcttcctgagggcagggtttttaaatagcatccaggccccgcatccagtgccagggggaggatctttgccccccaggattcctgctggcagaccagtaatgattgtggtggaatatatggagaatggatccctagactcctttttgcggaagcatgatggccacttcacagtcatccagttggtcggaatgctccgaggcattgcatcaggcatgaagtatctttctgatatgggttatgttcatcgagacctagcggctcggaatatactggtcaatagcaacttagtatgcaaagtttctgattttggtctctccagagtgctggaagatgatccagaagctgcttatacaacaactggtggaaaaatccccataaggtggacagccccagaagccatcgcctacagaaaattctcctcagcaagcgatgcatggagctatggcattgtcatgtgggaggtcatgtcctatggagagagaccttattgggaaatgtctaaccaagatgtcattctgtccattgaagaagggtacagacttccagctcccatgggctgtccagcatctctacaccagctgatgctccactgctggcagaaggagagaaatcacagaccaaaatttactgacattgtcagcttccttgacaaactgatccgaaatcccagtgcccttcacaccctggtggaggacatccttgtaatgccagagtcccctggtgaagttccggaatatcctttgtttgtcacagttggtgactggctagattctataaagatggggcaatacaagaataacttcgtggcagcagggtttacaacatttgacctgatttcaagaatgagcattgatgacattagaagaattggagtcatacttattggacaccagagacgaatagtcagcagcatacagactttacgtttacacatgatgcacatacaggagaagggatttcatgtatgaaagtaccacaagcacctgtgttttgtgcctcagcatttctaaaatgaacgatatcctctctactactctctcttctgattctccaaacatcacttcacaaactgcagtcttctgttcagactataggcacacaccttatgtttatgcttccaaccaggattttaaaatcatgctacataaatccgttctgaataacctgcaactaaaaccctggcccactgcagattattgctacgcaatgcaacagctttaaaacctatctcagcccatgaatggaaaacaaatccaaatccgatccttgaaaagcaaaggctctaaagaagctcttcagaagagacggtaaagaatgaattcttttacttatcacccaaccacatttcttaaaaatgtgttttggtgtcttttcctaccaaatttctgctctacaaggcagtcagttaaatctctcatttcataattttcactgtgctagttctttcttttctcctcttttaataaattttctaaaacttt

SEQ ID NO: 152 - DNA, 4426 bp, Homo sapiens
gtgcgcgctccgccctcgggccgcctgcactgcaattggttggtgtctctgggagggatttgaaacttggcggttaaagctccggctgggacagggcggcgggagaccccgggtgaacggggaagggacatttagtttgagacggtgctgagataggatcatgaaggaagaggtgaagggaattcctgtaagagtggcactgcgttgtcgccctctggtccccaaagagattagcgagggctgccagatgtgcctttccttcgtgcccggggagactcaggtggtggttggtactgataaatccttcacctacgattttgtgtttgacccctgtactgagcaggaagaagtcttcaataaagcagtagcgccgctcataaaaggcatatttaaaggatataatgcaacggtcctggcctatgggcagactggctctggaaaaacctattcaatgggaggtgcatacactgcggagcaggagaatgaaccaacagttggcattattcctagggtaatacaactgctcttcaaagaaattgataaaaagagtgactttgaatttactctgaaagtgtcttacttagagatttacaatgaagaaattttggatcttctatgcccatctcgtgagaaagctcaaataaatatacgggaggatcctaaggaaggcataaagattgtgggactcactgagaagactgttttagttgccttggatactgtttcctgtttggagcagggcaacaactctaggactgtggcctccacagctatgaactcccagtcgtcccgatctcatgccatctttacaatctccatagagcaaagaaagaaaagtgacaagaattgcagctttcgctccaagctgcatcttgtagatctcgctggatcagaaagacagaagaaaaccaaggctgaaggggatcgtctaaaagagggtattaatattaaccgaggcctcctatgcttgggaaatgtaatcagtgctcttggagatgacaaaaagggtagctttgtgccctacagagattccaagttaactcgactgctgcaagattctctaggaggtaacagccacactcttatgatagcctgtgtgagtcctgctgactccaatctagaggaaacattaagtacccttcgctatgctgacagagcaagaaaaatcaagaacaaacctattgttaatattgatccccacacagctgaacttaatcatctaaagcaacaggtacaacagctacaagtcttgttgctacaagcccatggaggtaccctgcctggatctataaatgcagaaccatcagagaatctacaatccctgatggagaagaatcagtccctggtagaggagaatgaaaaattaagtcgttgtctgagcaaggcagctggtcagacagcccagatgttggagaggatcattttgacagagcaagtgaatgaaaaactgaacgccaagctagaagagctcaggcagcatgtggcctgcaagctggatcttcaaaagctagtggagactttggaagaccaggaattgaaagaaaatgtagagataatttgtaacctgcagcaactgattacccagttatcagatgaaactgttgcttgcacggctgcagccattgatactgcggtagaagaagaagctcaagtggaaaccagtccagagacaagcaggtcttctgacgcttttaccactcagcatgctctccatcaagctcagatgtctaaggaggtggttgagttgaataacgcccttgcactgaaagaggccctagttaggaagatgactcagaacgacaaccaactacagcccattcagtttcaataccaggataacataaaaaatctagaattagaagtcatcaatctgcaaaaggaaaaggaagaattggttcgtgaacttcagacagcaaagaagaatgtcaaccaagccaagctgagtgagcaccgccacaaacttctccaggagctggagggtcaaatagctgatctgaagaagaaactgaatgagcagtccaaacttctgaaactaaaggaatccacagagcgtactgtctccaagctgaaccaagagatatggatgatgaaaaaccagcgggtacagttaatgcgtcaaatgaaagaggatgctgagaagtttagacaatggaagcagaaaaaagacaaagaagtaatacagttgaaagaacgagaccgtaagaggcaatatgagctgctcaaacttgaaagaaacttccagaaacaatccagtgtgctcagacgtaaaacggaagaggcagcagctgccaacaagcgactcaaggatgctctccagaaacaacgagaggtcacagataagcggaaagagactcagagccatggaaaggaaggtattgcagctcgagtgaggaattggcttggaaatgaaattgaggttatggtcagtactgaggaagccaaacgccatctgaatgacctccttgaagacagaaagatcctggctcaggatgtggttcaactcaaagaaaaaaaggaatctcgggagaatccacctcctaaactccggaagtgtacattctccctttctgaggtgcatggtcaagttttggagtcagaagattgtattacaaaacagattgaaagcctagagactgaaatggaactcaggagtgctcagattgctgacctacagcagaagctgctggatgcagaaagtgaagataggccaaaacaatgctgggagaatattgccaccattctggaagccaagtgtgccctgaaatatttgattggagagctggtctcctccaaaatacatgtcaccaaacttgaaaacagcctgagacagagcaaggccagctgtgctgacatgcagaagatgctatttgaggaacaaaatcatttttctgagatagagacagagttacaagctgagctggtcagaatggagcaacagcaccaagagaaggtgctataccttgtcagccagctgcaggaaagccaaatggcagagaagcagttagagaaatcagccagtgaaaaggaacaacagctggtgagcacactgcagtgtcaggatgaagaacttgagaagatgcgagaagtgtgtgagcaaaatcagcagcttctccaagagaatgaaatcatcaagcagaaactgatcctcctccaggtagccagcagacagaaacatcttcctaatgatacccttctatctccagactcttcttttgaatatatcccacctaagccaaaaccttctcgtgttaaagaaaagtttctggagcaaagcatggacatcgaggatctaaaatattgttcagagcattctgtgaatgagcatgaagatggtgatggtgatggcgacagtgatgagggggatgatgaggaatggaagccaacaaaattagtcaaggtgtccaggaagaacatccaagggtgttcctgcaagggctggtgtgggaacaagcagtgtgggtgcaggaagcaaaagtcagactgtggtgtggactgtagctgtgaccccacaaagtgtcggaaccgccagcaaggcaaggatagcttgggcactgttgaacagacccaggattccgaaggctccttcaaactggaggatcctaccgaggtgaccccaggattgagcttctttaaccctgtctgtgccacccccaatagcaagatcctgaaagagatgtgtgacatggagcaggtgctgtcaaagaagactgctccagctccctccccttttgacctcccagagtcgaaacatggagcaacagaataccaacaaaataagcctccagggaagaaaaagaaacgagctctggctagcaacaccagcttcttctctggctgctcccctatcgaagaagaggcccactgaagttggagtcatcatctctacccccaatctggcttgggagatgctttccagttgcagccagaaggggttttttaaatgacttctctggatttcaggtttcttgccgttgaaaaaaaggaacaaagcattactaaaaagaaggtaacctttgttggatgttgtccctcagtctccatccccagactactgctctctgctctctagaaggctgctaaaccacctgctgaagagagaaccaacagactttcctaatgactcatcaggaaccagtcctcagtatgatcaagttccttcttatttgtgagcagttcaggctatctcctgatggggatgaggccaaggctttcttatcttttggttgtctctgcttaatggaggagcctggcctaggatggaggtctggctcagatctttcactccacctcgggaatggggttgtgatctttcctgtcctgaccccctctgaattgtaagtgtttcaatagtactcttgattgtatgccatgttgttgaagtaaatgaattatttttaaatgttaagtaaataaaccttagcccatc

SEQ ID NO: 153 - DNA, 933 bp, Homo sapiens
atgctctgtgcagatgtagtggagaccgaggtgggcatggaagtgtctgtggatcagcagttctcgccggacctcaatgacaacacttcccaggcctacagggatttcaacaagaccttctggaatcagatgcagaagatttttgcagacatgcagggcttcaccttcaagggtgtggagatcctgtccctgaggaatggcagcatcgtggtggactacctggtcctgctggagatgcccttcagcccccagctggagagcgagtatgagcaggtgaagaccacgctgaaggaggggctccagaacgccagccaggatgcgaacagctgccaggactcccagaccctgtgttttaagcctgactccatcaaggtgaacaacaacagcaagacagagctgaccccggaagccatctgccgccgcgccgctcccacgggctatgaagagttctacttccctctggtggaggccacccggctccgctgtgtcaccaaatgcacgtcgggcgtggacaacgccatcgactgtcaccagggccagtgcgttctagagacgagcggtcccgcgtgtcgctgctactccaccgacacgcactggttctctggcccgcgctgcgaggtggccgtccactggagggcgctggtcgggggcctgacggccggcgccgcgctgctggtgctgctgctgctggcgctgggcgtccgggcggtgcgctccggatggtggggcggccagcgccgaggccggtcctgggaccaggacaggaaatggttcgagacctgggatgaggaagtcgtgggcactttttcaaactggggtttcgaggacgacggaacagacaaggatacaaatttccatgtggccttggagaacgtggacaccactatgaaggtgcacatcaagagacccgagatgacctcgtcctcagtgtga

SEQ ID NO: 154 - DNA, 9727 bp, Homo sapiens
gcgcaagaggatcagggatagcctctgagctcgggttcccagggttcgtagcttccaacggctgcgcgcgcacttcggtcgcgggcggtgaggtgctgttgctgaaacgctgccgctgagggtggactcgatttcccagggtcccgccgcgggagtctccggcgggcgggcgcgcgcgagccaccgagcgaggtgatagaggcggcggcccaggcgtctgggtcctgctggtcttcgcctttcttctccgcttctaccccgtcggccgctgccactggggtccctggccccaccgacatggcggcggtgttgcagcaagtcctggagcgcacggagctgaacaagctgcccaagtctgtccagaacaaacttgaaaagttccttgctgatcagcaatccgagatcgatggcctgaaggggcggcatgagaaatttaaggtggagagcgaacaacagtattttgaaatagaaaagaggttgtcccacagtcaggagagacttgtgaatgaaacccgagagtgtcaaagcttgcggcttgagctagagaaactcaacaatcaactgaaggcactaactgagaaaaacaaagaacttgaaattgctcaggatcgcaatattgccattcagagccaatttacaagaacaaaggaagaattagaagctgagaaaagagacttaattagaaccaatgagagactatctcaagaacttgaatacttaacagaggatgttaaacgtctgaatgaaaaacttaaagaaagcaatacaacaaagggtgaacttcagttaaaattggatgaacttcaagcttctgatgtttctgttaagtatcgagaaaaacgcttggagcaagaaaaggaattgctacatagtcagaatacatggctgaatacagagttgaaaaccaaaactgatgaacttctggctcttggaagagaaaaagggaatgagattctagagcttaaatgtaatcttgaaaataaaaaagaagaggtttctagactggaagaacaaatgaatggcttaaaaacatcaaatgaacatcttcaaaagcatgtggaggatctgttgaccaaattaaaagaggccaaggaacaacaggccagtatggaagagaaattccacaatgaattaaatgcccacataaaactttctaatttgtacaagagtgccgctgatgactcagaagcaaagagcaatgaactaacccgggcagtagaggaactacacaaacttttgaaagaagctggtgaagccaacaaagcaatacaagatcatcttctagaggtggagcaatccaaagatcaaatggaaaaagaaatgcttgagaaaatagggagattggagaaggaattagagaatgcaaatgaccttctttctgccacaaaacgtaaaggagccatattgtctgaagaagagcttgccgccatgtctcctactgcagcagctgtagctaagatagtgaaacctgggatgaaactaactgagctctataatgcttatgtggaaactcaggatcagttgcttttggagaaactagagaacaaaagaattaataagtacctagatgaaatagtgaaagaagtggaagccaaagcaccaattttgaaacgccagcgtgaggaatatgaacgtgcacagaaagctgtagcaagtttatctgttaagcttgaacaagctatgaaggagattcagcgattgcaggaggacactgataaagccaacaagcaatcatctgtacttgagagagataatcgaagaatggaaatacaagtaaaagatctttcacaacagattagagtgcttttgatggaacttgaagaagcaaggggtaaccacgtaattcgtgatgaggaagtaagctctgctgatataagtagttcatctgaggtaatatcacagcatctagtatcttacagaaatattgaagagcttcaacaacaaaatcaacgtctcttagtggcccttagagagcttggggaaaccagagaaagagaagaacaagaaacaacttcatccaaaatcactgagcttcagctcaaacttgagagtgcccttactgaactagaacaactccgcaaatcacgacagcatcaaatgcagcttgttgattccatagttcgtcagcgtgatatgtaccgtattttattgtcacaaacaacaggagttgccattccattacatgcttcaagcttagatgatgtttctcttgcatcaactccaaaacgtccaagtacatcacagactgtttccactcctgctccagtacctgttattgaatcaacagaggctatagaggctaaggctgcccttaaacagttgcaggaaatttttgagaactacaaaaaagaaaaagcagaaaatgaaaaaatacaaaatgagcagcttgagaaacttcaagaacaagttacagatttgcgatcacaaaataccaaaatttctacccagctagattttgcttctaaacgttatgaaatgctgcaagataatgttgaaggatatcgtcgagaaataacatcacttcatgagagaaatcagaaactcactgccacaactcaaaagcaagaacagattatcaatacgatgactcaagatttgagaggagcaaatgagaagctagctgtcgcagaagtaagagcagaaaatttgaagaaggaaaaggaaatgcttaaattgtctgaagttcgtctttctcagcaaagagagtctttgttagctgaacaaagggggcaaaacttactgctaactaatctgcaaacaattcagggaatactggagcgatctgaaacagaaaccaaacaaaggcttagtagccagatagaaaaactggaacatgagatctctcatctaaagaagaagttggaaaatgaggtggaacaaaggcatacacttactagaaatctagatgttcaacttttagatacaaagagacaactggatacagagacaaatcttcatcttaacacaaaagaactattaaaaaatgctcaaaaagaaattgccacattgaaacagcacctcagtaatatggaagtccaagttgcttctcagtcttcacagagaactggtaaaggtcagcctagcaacaaagaagatgtggatgatcttgtgagtcagctaagacagacagaagagcaggtgaatgacttaaaggagagactcaaaacaagtacgagcaatgtggaacaatatcaagcaatggttactagtttagaagaatccctgaacaaggaaaaacaggtgacagaagaagtgcgtaagaatattgaagttcgtttaaaagagtcagctgaatttcagacacagttggaaaagaagttgatggaagtagagaaggaaaaacaagaacttcaggatgataaaagaagagccatagagagcatggaacaacagttatctgaattgaagaaaacactttctagtgttcagaatgaagtacaagaagctcttcagagagcaagcacagctttaagtaatgagcagcaagccagacgtgactgtcaggaacaagctaaaatagctgtggaagctcagaataagtatgagagagaattgatgctgcatgctgctgatgttgaagctctacaagctgcgaaggagcaggtttcaaaaatggcatcagtccgtcagcatttggaagaaacaacacagaaagcagaatcacagttgttggagtgtaaagcatcttgggaggaaagagagagaatgttaaaggatgaagtttccaaatgtgtatgtcgctgtgaagatctggagaaacaaaacagattacttcatgatcagatcgaaaaattaagtgacaaggtcgttgcctctgtgaaggaaggtgtacaaggtccactgaatgtatctctcagtgaagaaggaaaatctcaagaacaaattttggaaattctcagatttatacgacgagaaaaagaaattgctgaaactaggtttgaggtggctcaggttgagagtctgcgttatcgacaaagggttgaacttttagaaagagagctgcaggaactgcaagatagtctaaatgctgaaagggagaaagtccaggtaactgcaaaaacaatggctcagcatgaagaactgatgaagaaaactgaaacaatgaatgtagttatggagaccaataaaatgctaagagaagagaaggagagactagaacaggatctacagcaaatgcaagcaaaggtgaggaaactggagttagatattttacccttacaagaagcaaatgctgagctgagtgagaaaagcggtatgttgcaggcagagaagaagctcttagaagaggatgtcaaacgttggaaagcacgtaaccagcatctagtaagtcaacagaaagatccagatacagaagaatatcggaagctcctttctgaaaaggaagttcatactaagcgtattcaacaattgacagaagaaattggtagacttaaagctgaaattgcaagatcaaatgcatctttgactaacaaccagaacttaattcagagtctgaaggaagatctaaataaagtaagaactgaaaaggaaaccatccagaaggacttagatgccaaaataattgatatccaagaaaaagtcaaaactattactcaagttaagaaaattggacgtaggtacaagactcaatatgaagaacttaaagcacaacaggataaggttatggagacatcggctcagtcctctggagaccatcaggagcagcatgtttcagtccaggaaatgcaggaactcaaagaaacgctcaaccaagctgaaacaaaatcaaaatcacttgaaagtcaagtagagaatctgcagaagacattatctgaaaaagagacagaagcaagaaatctccaggaacagactgtgcaacttcagtctgaactttcacgacttcgtcaggatcttcaagatagaaccacacaggaggagcagctccgacaacagataactgaaaaggaagaaaaaaccagaaaggctattgtagcagcaaagtcaaaaattgcacacttagctggtgtaaaagatcagctaactaaagaaaatgaggagcttaaacaaaggaatggagccttagatcagcagaaagatgaattggatgttcgcattactgcgctaaagtcccaatatgaaggtcgaattagtcgcttggaaagagaactcagggagcatcaagagagacaccttgagcagagagatgagcctcaagaaccttctaataaggtccctgaacagcagagacagatcacattgaaaacaactccagcttctggtgaaagaggaattgccagcacatcagacccaccaacagccaatatcaagccaactcctgttgtgtctactccaagtaaagtgacagctgcagctatggctggaaataagtcaacacccagggctagtatccgcccaatggttacacctgcaactgttacaaatcccactactaccccaacagctacagtgatgcccactacacaagtggaatcacaggaagctatgcagtcagaagggcctgtggaacatgttccagtttttggaagcacaagtggatccgttcgttctactagtcctaatgtccagccttctatctctcaacctattttaactgttcagcaacaaacacaggctacagcttttgtgcaacccactcaacagagtcatcctcagattgagcctgccaatcaagagttatcttcaaacatagtagaggttgttcagagttcaccagttgagcggccttctacttccacagcagtatttggcacagtttcggctacccccagttcttctttgccaaagcgtacacgtgaagaggaagaggatagcaccatagaagcatcagaccaagtctctgatgatacagtggaaatgcctcttccaaagaagttgaaaagtgtcacacctgtaggaactgaggaagaagttatggcagaagaaagtactgatggagaggtagagactcaggtatacaaccaggattctcaagattccattggagaaggagttacccagggagattatacacctatggaagacagtgaagaaacctctcagtctctacaaatagatcttgggccacttcaatcagatcagcagacgacaacttcatcccaggatggtcaaggcaaaggagatgatgtcattgtaattgacagtgatgatgaagaagaggatgatgatgaaaatgatggagaacatgaggattatgaagaggatgaggaagatgatgatgatgatgaagatgacacagggatgggagatgagggtgaagatagtaatgaaggaactggtagtgccgatggcaatgatggttatgaagctgatgatgctgagggtggtgatgggactgatccaggtacagaaacagaagaaagtatgggtggaggtgaaggtaatcacagagctgctgattctcaaaacagtggtgaaggaaatacaggtgctgcagaatcttctttttctcaggaggtttctagagaacaacagccatcatcagcatctgaaagacaggcccctcgagcacctcagtcaccgagacgcccaccacatccacttcccccaagactgaccattcatgccccacctcaggagttgggaccaccagttcagagaattcagatgacccgaaggcagtctgtaggacgtggccttcagttgactccaggaataggtggcatgcaacagcatttttttgatgatgaagacagaacagttccaagtactccaactcttgtggtgccacatcgtactgatggatttgctgaagcaattcattcgccgcaggttgctggtgtccctagattccggtttgggccacctgaagatatgccacaaacaagttctagtcactctgatcttggccagcttgcttctcaaggaggtttaggaatgtatgaaacacccctgttcctagctcatgaagaagagtcaggtggccgaagtgttcccactactccactacaagtagcagccccagtgactgtatttactgagagcaccacctctgatgcttcggaacatgcctctcaatctgttccaatggtgactacatccactggcactttatctacaacaaatgaaacagcaacaggtgatgatggagatgaagtatttgtggaggcagaatctgaaggtattagttcagaagcaggcctagaaattgatagccagcaggaagaagagccggttcaagcatctgatgagtcagatctcccctccaccagccaggatcctccttctagctcatctgtagatactagtagtagtcaaccaaagcctttcagacgagtaagacttcagacaacattgagacaaggtgtccgtggtcgtcagtttaacagacagagaggtgtgagccatgcaatgggagggagaggaggaataaacagaggaaatattaattaaatggtctgtaaacaataacaactgtgaataagattatcaaatctgttttagtgtaatgattgtcaagtttaaaaacatttttatatataaactggtatactcatgtcaatattctttattaataaaatgtttttcagtgtcaaaatttattattcatttcttcattagttgactcctcctttgctcatcagtctaaggacagttgtaccagactttggataaggtctgcccagaacgagtagtaattgctcttgctgttctactaggcacatcaatgttatagtattgatctaaatggaagagaaaacatttttttagttaaaaagaaaacaatgcccaaactaaaaaataacttatgttgactattatgctcaaagacaatgtttatcattttaatagagatgtttttactaattaatttgaactttataacaaaaagaaaaacaattgcctagacttttcagcttttttgatgtttcaaaagattgacatttcaccatctttttgtaaaatcaggttcagctctcctttatgaagtaaacattaaagagtaaccaagtttgaaaaataatttacttggggttattccttttaaaaaatacatgccaatgtcattcatattatgaaattacaggcagaataacttagatttctgggcatttcaaagaaaagcatcctgagtaatataatttaattaataaaattagtttctcaggaacttctttctgatcttacagactctgcagtgatgcaaatcattataaccttgtgccaaacaaggtatctgttaaatgccacaaatgatagaagtaaaatactattgtcagtagcaagtttactctagtaactggatgttttatcgtaatctcatgaaggttagagcagaattgaattgcagtgccatcattttaattgaaattaaagcaaaagtcttaactcttttccacagcaattagaataagtaccgtagtgtaacttctcacattcagtcatcattgcagccagcatttttactttatcttcatgttttcacaaatgatatcacctccttgggaaactgttagttaataccttacctttagaaaaggcatagtaatcatagccgtcaggttttctgatgttgggcagtgatatagctgaggtaaccacatttggaagtcctctccacagtatactcactttaacttcattatgaaggacacctgtaagtggcatgtttaataaaagataccagattaaaaggcaatgtactatcttggaaagagccagacatctgagttttaatctcagttttagccctctgatgtagaactattgagggttatagactggtatataatgttcttggtaagaagtacttgataaatagtattggttataactaacaaacctgaacaaactgctttacttacccacaaggaaaaagaaagtattggtctttggttattcactaaggcaagtggatgagtttttcatcagtaagcttaaattattagggctgtttgatcagtatccatatttcataagccttactgtataagaaactgtattacatctacttatgtttaaggatttttttaacacaataaaaatgttacctttgtcttgataagccagtctggcaggtgaatattgaattctgatggtgtgtgtttgagaaggtcctatagcacgttcaaagcgacgtctcctaacctgtgtcgtttctccatacactggataatttagagcaggccttcttccagggcacttctgtacaggttcctgtttataaatatactgctgaatgctgccacctgttatgtattagaatatcacatggaaaatgaaaattaattttaataccctcagaaaaggtggaaaacaacttttacaatgtataggaaacagttttgttctcatttttcatataatatattgatattaataatggctattagtcaagggtattataaaaataattattaaactgaaatacttgttgaatgaatagatgcagcaaattacatagttatatatttaatttcaattgaaagtgacaagtgctcagtttggcagcacatatactaaaactggaatgatacagagattagcatggcccttgtgcaaggatgacatgcacatttgtgaagcgaaagtaaatgacattctatcagtgacctgaaaactcaaatgaattgtgacttgcctgtgaagaaatgaaaataaaaattgagggcaataagaatactaccctcaatattgatttttttcactgaaaatatttgatttcagccattaaagatatcttttgacagtaaagtcaataataaatgaaaaaaaaaaaaaaaaaaaaaaa

SEQ ID NO: 155 - DNA, 1161 bp, Homo sapiens
acccgggaaaccggaagccgcctcccacttggttgctcgtacgcggctagtgggtcctcagtggatgtaggctgggcgccgcgatgttcgacgggacaccggcggagagcgacctcggggttaaggggtggggctgacgtcaggagccaagatggcggcggtggtcgccctctccttgaggcgccggttgccggccacaacccttggcggagcctgcctgcaggcctcccgaggagcccagacagctgcagccacagctccccgtatcaagaaatttgccatctatcgatgggacccagacaaggctggagacaaacctcatatgcagacttatgaagttgaccttaataaatgtggccccatggtattggatgctttaatcaagattaagaatgaagttgactctactttgaccttccgaagatcatgcagagaaggcatctgtggctcttgtgcaatgaacatcaatggaggcaacactctagcttgcacccgaaggattgacaccaacctcaataaggtctcaaaaatctaccctcttccacacatgtatgtgataaaggatcttgttcccgatttgagcaacttctatgcacagtacaaatccattgagccttatttgaagaagaaggatgaatctcaggaaggcaagcagcagtatctgcagtccatagaagagcgtgagaaactggacgggctctacgagtgcattctctgtgcctgctgtagcaccagctgccccagctactggtggaacggagacaaatatctggggcctgcagttcttatgcaggcctatcgctggatgattgactccagagatgacttcacagaggagcgcctggccaagctgcaggacccattctctctataccgctgccacaccatcatgaactgcacaaggacctgtcctaagggtctgaatccagggaaagctattgcagagatcaagaaaatgatggcaacctataaggagaagaaagcttcagtttaactgtttccatgctaaacatgatttataaccagctcagagctgaacataatttatatctaatttgagttcctttaaagatcttggttttccatgaatacagcatgtataataaaaattttaagaaataaatgttattctactttattaacaaaaaaaaaaaaaaaaaa

SEQ ID NO: 156 - DNA, 5219 bp, Homo sapiens
gggctgcagggatggcgatcagggcggggaggtcgggccctggcgcggggcgcacgcgtgaagcagcaccgcacgtgtgaaaggaattcttttcagagcggccgggagccctgctccggaggaacgcacccgggtcgccgccgcggcagagcggggttaggaatctgaagcaatgggcgactggagctttctgggaagactcttagaaaatgcacaggagcactccacggtcatcggcaaggtttggctgaccgtgctgttcatcttccgcatcttggtgctgggggccgcggcggaggacgtgtggggcgatgagcagtcagacttcacctgcaacacccagcagccgggctgcgagaacgtctgctacgacagggccttccccatctcccacatccgcttctgggcgctgcagatcatcttcgtgtccacgcccaccctcatctacctgggccacgtgctgcacatcgtgcgcatggaagagaagaagaaagagagggaggaggaggagcagctgaagagagagagccccagccccaaggagccaccgcaggacaatccctcgtcgcgggacgaccgcggcagggtgcgcatggccggggcgctgctgcggacctacgtcttcaacatcatcttcaagacgctgttcgaggtgggcttcatcgccggccagtactttctgtacggcttcgagctgaagccgctctaccgctgcgaccgctggccctgccccaacacggtggactgcttcatctccaggcccacggagaagaccatcttcatcatcttcatgctggcggtggcctgcgcgtccctgctgctcaacatgctggagatctaccacctgggctggaagaagctcaagcagggcgtgaccagccgcctcggcccggacgcctccgaggccccgctggggacagccgatcccccgcccctgccccccagctcccggccgcccgccgttgccatcgggttcccaccctactatgcgcacaccgctgcgcccctgggacaggcccgcgccgtgggctaccccggggccccgccaccagccgcggacttcaaactgctagccctgaccgaggcgcgcggaaagggccagtccgccaagctctacaacggccaccaccacctgctgatgactgagcagaactgggccaaccaggcggccgagcggcagcccccggcgctcaaggcttacccggcagcgtccacgcctgcagcccccagccccgtcggcagcagctccccgccactcgcgcacgaggctgaggcgggcgcggcgcccctgctgctggatgggagcggcagcagtctggaggggagcgccctggcagggacccccgaggaggaggagcaggccgtgaccaccgcggcccagatgcaccagccgcccttgcccctcggagacccaggtcgggccagcaaggccagcagggccagcagcgggcgggccagaccggaggacttggccatctagtgcccgggtgcctgcctccagacagctgtgtagtgatctttttcttagaaaccaaaaccaaagtgcacttcccaccagcagatagaacctgaaagtcccaggaggtgggagcgactggagtcccaggaggtggacgatggaggagagatcaggtttccgtgttcaatgcttgctgttcttagcactgtgagttacagtggggataactcccactttctgagtttgggggtggcggggacaagggttgtgggcctttaagatcttcacagcagcccagaaatctggtcgctgagggctgtctctgggggtaactgttctgtagtggtaaagcaacaggtatcctgcagtccctttagctcctgggcaattgggtttgctattcctaagctctccagagcctctgggcggcccagagggtcttagctctgggccagagcacttagctctatctctttgatacttttaacttagagttgaatttcatttgggatatttgccaaactgcactaaaaaaagatttacagcaagtctatgtagtgtcatttgagtttccgaaattgcatgtgaagcccaggatatcaagcttcaggcctcatgacaagtgacaaagagcagttgccctccagaggcaggctcagtgggcaagggccccagaggttgctggcagaaggcaggtggaaacgcagccacgcctgaggccatttttaaacagttgaggaaattgacataaaagtgtgtcgggtatgccgtaggtatttattttctaaatgattattttgtgctttgaatggtgcagctatgcctattttctcccactttctttcaggaaaaatgaaagaaaaatagtgtttttctttctttaaatactgttagaatgattgctgaccaagacagtgctaatttgccctaatgcatgctactagcatctttactaaagattttgaactttcttgtaaaagaaattctttaatttcatgagtcacctaattataatgagaatgtattatataaaacaaaagcaggggaaagttttaagtgcattcaaatagaagttctgaagattttgaatgggaagtgaaaagtgaactactgttgccaggaaaattatttatacagatgaatctatgacaatctacacttttaaaaagtacagaataaaacacttcaagcttcctaatcattctttgtgggcagcctgtttgctttctccagtgtaaataatataagtgtctggggatccctgcctgggggagggcgcgtgctcatgcaggctgtatgccccattctgcctccacaccagagctgtcctgacagggaaggctatttatgtgtgtgggcatggctggaagacggcagaattttctgtcctgcacacacagctgtagtatcttggtcaccatttgtttataaaatgaacgatggtcatgttgagcctgtttctactcacacttttcacctccaacttctactgagtatcattagcccttgttcagcgagaccaatgtaatacatttctttttataaattaacttctcgatgatgcatttgggaccacactccaaacatactttctgttttctatcataaagggtgctccactaacaatctgatgaaaggaatgcaatttccaagtctcagattcttgcatgcaactagtttttcatgtcagtcaaacacaaagaatttgttagtacattctgcttgctgtaggatgcactggacaggctcctaggcttgaaaaatgctaacttttccatacgtctcctcagagactttctcaaccagattgacaagagagaaattagccctttggaaaactgtgagtgactttctcactcctctccaggctggtgcataactacagccattctagatgcataacttctctccgaagttcactcattacatgcagtgtatgccataggcctagggcagcaggacttagttcttgtgagtgataagggctgctagaagatcctagtgtgagaagcattccgataaaaagctttggccattttagaaaatgcaatagcaatcatccaagagcacaagtacagctcaagtacaagtggatgtcaatacttggttctttaagttctaccataataaatgttcataacagtaacaagcttcttatttacccacaatttgattttgagtggggttggagatgagcatgagaactcaaattgtatctagtttttacattttaaaattgaatttagtcacaatatgtttatggaaatgccagtattgtaccattgaccatagtctagtgggtccatttagagtggataggagtgtagaattagattcacctacttgaaaatcactaatctataaagaagtgaggttttgcaatagaacagtgcctgtggtgttttttcaggttagcatactgatttcagttcatgtaagaaatgaacgcatgtttcacatccttttgctctttgaggtatccatgattctaaaggctgggtccttctctctcaggcagtgtggaattgttctctactcaactagtcctttaagacattgaaacatgcaataaaaatagaaattgcctctctctgtgggcaagattccagacctatttttttctagcctggaaatttcactgaaactattttgttcttgattcattagaaagttttaaaaaatctctaagcctattttaaaactcaaatgctatacctatagcatttgagtattatatttacatacatggtttttaagctgctgtatacaattacttcttatatccctgtttttataaaatgttaaacatcactatagttacagtaccaaaaatcattttttaaattctaaaactattacttatattatcactcactttctcctttttaaacttttaatggttattcttgtattttttaataaaattgacacgaataaatccttaaatttacaaaagaaaaatagcaagccagcatctttctcatttatcctggatttcttcggctctggacaagtaagtggataggtcatagaattcctacacaagaatacctggactaataactatgaatataatttaaacatcactttacaaaaaattaatccaatagggtttaggtctcctttcacgttaggctttttaaaaagtattattaacactttctttattttgtattactgaataaactccttttttctgaattttttgaacttctgatatttgtaacactaattcatgaatctccaccaaaataaatacttatagagagtattgcatgatttaagagagtaaatgtgttttccaaagatgaatagagtcctgccaccatcaccacccgccacccctacaaattgaggatatcctaaataacctttaatatagcatatggacattgtacatttaaggtcagggaaggcacttttcttcctaattttatattacagtgcaaatcttgggttgactcactttaaggtttctgactgcccaaaatattttttcccctttacgttacagaacattataataaggcaaacaagttagggatttgaataacactcaaagcaacaaactgtttccagaaagtaccatatttgaagctgtttggtgtgtaaatgttcatttagctcatgtatttacaaaactcttactaaaacttaatttttgtgccataacagtgtctttcctggattacattgtaactggaagtaagcattttctaaaataataaaagtgcccttaagtttaaaaaaaaaaaaaaaa

SEQ ID NO: 157 - DNA, 942 bp, Homo sapiens
atccgggcaggataaaggcctgggtgaggcggctcacctaccctgctttctgcattcttctctccacatccctctctgtacttacagcccccaatggcccccaaaaagccagagcccaagaaggatgatgccaaggcagcccccaaggcagctccagctcccgcacctccccctgagcctgagcgccctaaggaggtcgagtttgatgcttccaagatcaagattgagttcacacctgagcagattgaagagttcaaggaagccttcatgctgttcgaccgcacacccaagtgtgagatgaagatcacctacgggcagtgtggggatgtcctgcgggcgctgggccagaaccccacacaggcagaagtgctccgtgtcctggggaagccaagacaggaagagctcaataccaagatgatggactttgaaactttcctgcctatgctccagcacatttccaagaacaaggacacaggcacctatgaggacttcgtggaggggctgcgggtcttcgacaaggagggcaatggcactgtcatgggtgctgagcttcgccacgtgctggccacgctgggtgagaggctgacagaagacgaagtggagaagttgatggctgggcaagaggactccaatggctgcatcaactatgaagcatttgtgaagcacatcatgtccagctaaacctcgtgcccaggaagcccagggaaggctgtgcagggacgtctcatctcccatgtgtgatgctgacaccagcggcctggagtcgtgggaaggaggggagccttaccaagactcctgcaaaaacccttggacctctccacgtggttgccgtctctggcccctctcaggctgtgcttacctgtgacagcagctctgtccccaccccatgggcctcatgaataaatggcttcttgccggccttcctttctaaaaaaaaaaaaa

SEQ ID NO: 158 - DNA, 5049 bp, Homo sapiens
acagacaagatgtcggcggatggtagcttcgagcccttgcggagaggagcatctctgtgacagaagcttgtcgacggcggcttctaggagctagtcgaaggagcgaggttgaggcgggcagcgacccgtcaggtcgctcacctgggcaccggccagctgcgagacgtgacttggggaccgcaggggagtggagagtgtgaggtgccaaagactagtaatgccccgtatccccctaggaagccgggaagccaagctccgcgggaccgcttcatgccgctgactggtgtagagcccgccagaatgaacaggaagaaaggagacaagggctttgaaagcccaaggccatataaattaacccatcaggtcgtctgcatcaacaacataaatttccagagaaaatctgttgtgggatttgtggaactgactatatttcccacagttgcaaacttgaatagaatcaagttgaacagcaaacagtgtagaatataccgagtaaggatcaatgatttagaggctgcttttatttataatgacccaaccttggaagtttgtcacagtgaatcaaaacagagaaacctcaattatttttccaatgcttatgcagctgcagttagtgctgtggaccctgatgcaggaaatggagaactttgcattaaggttccatcagagctatggaaacacgttgatgagttaaaggtcctgaagatacacatcaatttttctttggatcagcccaaaggaggtcttcattttgtggtacccagtgtagagggaagtatggcagagagaggtgctcatgttttctcttgtgggtatcaaaattctacaagattttggttcccttgtgttgattcatactctgaattgtgtacatggaaattagaatttacagtagatgctgcaatggttgctgtttctaatggcgatttggtggagacagtgtatactcatgatatgaggaagaaaactttccattatatgcttaccattcctacagcagcgtcaaatatctccttggccattggaccatttgaaatactggtagatccatacatgcatgaggttactcatttttgtttgccccaacttcttccattgctgaaacataccacatcataccttcatgaagtctttgaattttatgaagaaattcttacatgtcgttacccatactcctgttttaagactgtcttcattgatgaggcttatgttgaagtggctgcttatgcttccatgagcatttttagcacaaatcttttacacagtgccatgattatagatgagacacctttgactagaaggtgtttagcccaatccttggcccagcagttttttggttgtttcatatctagaatgtcttggtctgatgaatgggtgctgaagggaatttcaggctatatctatggactttggatgaaaaaaacttttggtgttaatgagtaccgccattggattaaagaggagctagacaaaatagtggcatatgaactaaaaactggtggggttttactacatcccatatttggtggaggaaaagagaaggataatccggcttcccatctacacttttcaataaagcatccacatacactgtcctgggaatactacactatgtttcagtgtaaagcccaccttgtgatgagattgattgaaaataggatcagtatggaatttatgctacaagttttcaataaactgctaagtctggctagtactgcttcatctcagaagttccagtcacatatgtggagtcagatgttggtttccacatctgggtttttgaaatccatttcaaatgtctctggcaaagatattcagccgttaataaagcagtgggtagatcagagtggagtggtaaaattttatggaagttttgcatttaatagaaaacgaaatgtcttggaactggaaataaaacaggactatacatctcctggaactcagaaatacgtgggaccacttaaagtgacagtgcaggagttagatggatccttcaatcatacactgcaaattgaagaaaacagccttaaacatgatataccctgccattccaaaagtagaaggaataaaaagaaaaaaatcccactgatgaatggagaagaagttgatatggatctttctgcaatggatgctgattcccctttgctgtggataaggatagacccagatatgtcagtattgaggaaggtagaatttgagcaagctgattttatgtggcagtatcagctccgctatgagagagatgttgttgcacagcaggaatccattttggctttggaaaaattccctactccagcatctcggcttgcactcactgatatattagaacaagagcagtgtttctacagagtaagaatgtcagcttgcttctgtcttgcaaagattgcaaattcaatggtgagcacatggacaggaccaccagccatgaagtcactcttcactaggatgttttgttgtaaaagttgtccaaacattgtgaaaacaaacaactttatgagctttcaaagctattttctacagaagactatgccagttgcaatggctttattaagagatgttcataatctttgtcctaaagaagtcttaacatttattttagacttaatcaagtacaatgacaacaggaaaaataagttttcagataactattatcgtgcagaaatgattgatgccctggccaactctgttacacctgcagtcagtgtgaataatgaagttagaactttggataacttaaatcctgatgtgcgactcattcttgaagaaatcaccagatttttgaatatggaaaaacttcttccgagttacaggcataccatcactgtcagttgtttgagagccatacgggtacttcagaagaacggacatgtgccaagtgatccagctctttttaaatcttatgctgaatatggccactttgtggacattaggatagcagctttggaagcagttgttgattatactaaagtggacagaagttatgaagaactgcaatggctacttaatatgattcagaatgaccctgtaccctatgtaaggcataagattctcaacatgttgactaagaacccaccatttactaagaacatggagtctcccttatgcaatgaagccctggtagatcaactttggaaacttatgaattctggtacttcacatgactggaggttacggtgtggtgctgtggacttgtacttcacactttttggcctcagtagaccttcctgtttacccttgccagagcttgggttggttcttaatctaaaggagaaaaaagctgtcttgaatcctaccataattccagagtcagtagcaggcaaccaagaagctgcaaataatccaagcagtcacccacagctagttggatttcagaaccctttttccagttctcaagatgaggaggagattgatatggatactgttcatgatagccaggccttcatttcccatcatttaaacatgcttgaaaggccgtcaactccagggctctcgaaatatcggccagctagctcccgatctgctttaataccccagcactcagcaggctgtgacagcacacccaccacaaaaccccagtggagtttggaacttgcacggaagggaacaggtaaagaacaagcacctttggagatgagtatgcatccagcggcaagcgctccactctcagtctttactaaggaatctacagcctccaaacacagtgaccaccatcaccaccatcaccatgagcacaagaaaaagaagaagaagcataaacataagcacaaacacaagcataagcatgacagtaaagaaaaggacaaggagcctttcactttctccagccctgccagtggcaggtctattcgttctccttccctttcagactgagaaggggacaaaaagacctttcctttcatgtccagaagaatgtatgtaactaaagctttgtcctctgtgaagaattataaaagggaggggggaaaggattcgcctctcctacagaaattctgaattcatttaagttctaagcatttgatttatgttatttatacagttgggatctaattaggaaaatgtgttttgtagttctggataaactatttcatccgctgtttcctccccaaaacacacacacagagcaaactccctttcataaaagccctcatatccactggcagtccccgttcgcatcatggtctccatgtgtaccgccaaagtcaattatgtttgaaagcctttggtggatgttatggggcaaagttatgatttacacagaagcaactgccaaatctgtggtgcaaccactatctccagtgaaatattgtataacaccatttggaactactgaaaagacagtggcttttctacagtactcttccttattgcaccatttttgtattaacgtagaaactaagcatcagaatttatgaacaaagaatatgttatttttccttttgctctaaaatactgagatttggggaagcaattcttttttaaaaaaattttgaataactatcttttgataacacattcggcggttacgatgttggaatttagcagaactatcaaatccaaaattattttcaaatcaagatgtttaaattataagtttttttgttttgttttccagtaagtataaatgaaaatattcatatgtaaaatatgttttgcttaatgtggacaatttacacacccaacacatactgtttccaaaattatttctatatgacacaaagtatgatacctttaaaaaggtgagcttatatattgtttattaacctggaaatagacaatttggctctcataccataagcatttaaaaacatatgaaatattttgatttctttatatggtggtgtgtttttatttctgaattttccatgtgctttaatatttgtttaagaatattttttatatctgttcaatttttatcattccccttatcattagaaagtttgacaaaaatacttgaatcttggacctctaaatatacttttagttgtgtttaacttgtttaataaataactttttaagttgaaaaaaaaaaaaaaaaaaaaaaaaaaaaaa

SEQ ID NO: 159 - DNA, 3285 bp, Homo sapiens
actccgcggtcctggtgccgcgtgcaggtcggtgcgcgcttctcccgaggtggaacgggcggcagtcaagcgccggcgttctctgccgtcaccctttccttgccggccggcacttcggctgcagagttttgcccacgcttcgagacttagggagcagtgcctttcagaatttgcccactcatctggtataactggttctgatggctgggaataaaggaagaggacgtgctgcttatacctttaatattgaggctgttggatttagcaaaggtgaaaagttacctgatgtagtgttgaaaccacccccactatttcctgatacagattataaaccagtgccactgaaaacaggagaaggtgaagaatatatgctggctttgaaacaggagttgagagaaacaatgaaaagaatgccttattttattgaaacacctgaagaaagacaagatattgaaaggtatagtaaaagatacatgaaggtatacaaggaagaatggataccagattggagaagacttccaagagagatgatgccaagaaataaatgtaaaaaagcaggcccaaaacccaaaaaggcaaaagacgcaggcaaaggcacaccactcactaatactgaagatgtgttgaaaaaaatggaggaattggaaaaaagaggtgatggtgaaaaatcagatgaggaaaatgaagagaaagaaggaagcaaagagaaaagtaaagaaggtgatgatgacgatgacgatgatgccgcagaacaggaggaatatgatgaagaagagcaagaagaggaaaatgactacattaattcatactttgaagatggagatgattttggcgcagacagtgatgacaacatggatgaggcaacctattaggcatgaaatttttcaaaaaatatttttatgatgcagcttctgaacatttggacagacttgatttgtattttatttctgataaggaataagtacttgtttctgttgttttggacaaatagttgttaccaaaatattcaaaaccactttgagtttacatactagttaccttaaaaattattccctgacactctgacattccttctaaacacctctgccatctctcttatgtactctcatgggtttttttgtatgatttgaatatgaatgtgcctaaagaatttttgctctcttaatctatgtatacatacttgaacaaatcattcttgcttaactgctgatcttttgtaaaactattgctagtcataatggatttctataacctgaaagttgatataatacagcacgtggagcactttaaaaacaaagaaacttgaaaataattttattttttacctttacatggtgtgttctagactactgcattatgactacataaacctacctgagctcttacaagtacagaattgtgagacagaggttttgtgatggaaaacatacacatagggaaaaataccaaactgagcaatataaatttcacagctcacatcttagccagtacaaagaaactttcacatggggtgaatattataatacttgaatttgagacttaatactgtatatgaattaatcatcccactgtaataactgacatcttcaaatagttgggcttatgaaaaatttgactaagacattttattttatactttatgtaaatgtgaaataagttctggtcatataaatatgtagaatgcatgtgtgtgaactctatgaagtgaagtgtggtggccttttatgtttcagagtactcaagtgtacaattgatttatataaaaatgcaaaatgaactcaggtcattttgaaattaatattaatatttttgttgtttaactttaaagctagctcccctaactttatatattttttgggaaaaaatacctaaaaacctcagcctacaaagactctcagaaatgccaaagattttcaaggaaattcatattatatatttcaaaaatgatttatcaatgttatctaccaaaagaaataattttatttttcccctttggggagatattatcctctaatatgagaatcagatccctagattctatttctacctatactattaaactcaaccttgaacctgagcttggttgtttctgtgccttagtttctccactcgtaaacaatttcctataaaaattgtttaaacaccaaccaaaatttaccatatgtattcattctcttgccttaaagatcacttcttaacttacatttggctctcaccctctaaaaatttgtagtttggagagtaactgaaagcacaattttaagaaacatgttttcctcacaaaatatattgtaatctgattttcctatcttgtattcatgcagaaaattggagaaaatgtgtattgtcttgtgccattctgcaatatgaatttctcaggaaaaagatgtttcaatggcaatactttcttaaataattcaagatgggtgtgaggacctatcttattagtttagtgctgtgttaaccatttgtgaattacttcttgtttaaaggaagttgtcaaaaaattttaagattctaaatggaatacacgaataaagtaagccttagaatagaaacctcacaaaaagttgtcatttgcggttgataattaacataggtgttttattctctcaactccttagtaccagagccaaatacaatttagttttcagaaatcttatcaatattgttctatttacctacttataaatctgcagataaccacttgaaccaggcaaatacactgaagataaaggttatttctttttttagctttgaatttgtcatgaccattttagtcttgcagatagcagggcagccccttggggcaaggatttactctgggaggtaccgttaagagccttctttccccctttgaaagatccttttacaatgttaaagtatactagttgcaagaacaagcaggatttgcaggttgctttaccagcatgagtctcatttttctggcttaaaatctgggactgtgaaattattccataggaaagtgaatgttattttgcagaattagcctcttacataaaagtatttgttgaagtgtctttaaaattgctatcatgagcaaaactggttgctgtaatgcttgtttttctgtatttatttacacattaaattcttacaaaacaaaatgtgttcgtttgttttatagtaagatgttttattttgaacttatttaaatgtttatttgttagagaaaactaatttgttaatatagatcttaactagtaactattaagcagggatgtttgttccaaatattcttgaataaacaatcaccacaaacaa

SEQ ID NO: 160 - DNA, 5190 bp, Homo sapiens
ccagaagttctccagggcttccgcagagcgactttttcgctgcctgtgagctgcagcgcgggagagctcgggctcgcgcggaccccagcgcctggcaggctgacagcgctctctcgccccaggtgcccgcgcgcgtggtgagcagctgcaccaggtggcgtccggggtggggtcaatgaagcgcagcctgaggaagatgtggcgccctggagaaaagaaggagccccagggcgttgtctatgaggatgtgccggacgacacggaggatttcaaggaatcgcttaaggtggtttttgaaggaagtgcatatggattacaaaactttaataagcaaaagaaattaaaaagatgtgacgatatggacaccttcttcttgcattatgctgcagcagaaggccaaattgagctaatggagaagatcaccagagattcctctttggaagtgctgcatgaaatggatgattatggaaatacccctctgcattgtgctgtagaaaaaaaccaaattgaaagcgttaagtttcttctcagcagaggagcaaacccaaatctccgaaacttcaacatgatggctcctctccacatagctgtgcagggcatgaataatgaggtgatgaaggtcttgcttgagcatagaactattgatgttaatttggaaggagaaaatggaaacacagctgtgatcattgcgtgcaccacaaataatagcgaagcattgcagattttgcttaaaaaaggagctaagccatgtaaatcaaataaatggggatgtttccctattcaccaagctgcattttcaggttccaaagaatgcatggaaataatactaaggtttggtgaagagcatgggtacagtagacagttgcacattaactttatgaataatgggaaagccacccctctccacctggctgtgcaaaatggtgacttggaaatgatcaaaatgtgcctggacaatggtgcacaaatagacccagtggagaagggaaggtgcacagccattcattttgctgccacccagggagccactgagattgttaaactgatgatatcgtcctattctggtagcgtggatattgttaacacaaccgatggatgtcatgagaccatgcttcacagagcttcattgtttgatcaccatgagctagcagactatttaatttcagtgggagcagatattaataagatcgattctgaaggacgctctccacttatattagcaactgcttctgcatcttggaatattgtaaatttgctactctctaaaggtgcccaagtagacataaaagataattttggacgtaattttctgcatttaactgtacagcaaccttatggattaaaaaatctgcgacctgaatttatgcagatgcaacagatcaaagagctggtaatggatgaagacaacgatgggtgtactcctctacattatgcatgtagacaggggggccctggttctgtaaataacctacttggctttaatgtgtccattcattccaaaagcaaagataagaaatcacctctgcattttgcagccagttatgggcgtatcaatacctgtcagaggctcctacaagacataagtgatacgaggcttctgaatgaaggtgaccttcatggaatgactcctctccatctggcagcaaagaatggacatgataaagtagttcagcttcttctgaaaaaaggtgcattgtttctcagtgaccacaatggctggacagctttgcatcatgcgtccatgggcgggtacactcagaccatgaaggtcattcttgatactaatttgaagtgcacagatcgcctggatgaagacgggaacactgcacttcactttgctgcaagggaaggccacgccaaagccgttgcgcttcttctgagccacaatgctgacatagtcctgaacaagcagcaggcctcctttttgcaccttgcacttcacaataagaggaaggaggttgttcttacgatcatcaggagcaaaagatgggatgaatgtcttaagattttcagtcataattctccaggcaataaatgtccaattacagaaatgatagaatacctccctgaatgcatgaaggtacttttagatttctgcatgttgcattccacagaagacaagtcctgccgagactattatatcgagtataatttcaaatatcttcaatgtccattagaattcaccaaaaaaacacctacacaggatgttatatatgaaccgcttacagccctcaacgcaatggtacaaaataaccgcatagagcttctcaatcatcctgtgtgtaaagaatatttactcatgaaatggttggcttatggatttagagctcatatgatgaatttaggatcttactgtcttggtctcatacctatgaccattctcgttgtcaatataaaaccaggaatggctttcaactcaactggcatcatcaatgaaactagtgatcattcagaaatactagataccacgaattcatatctaataaaaacttgtatgattttagtgtttttatcaagtatatttgggtattgcaaagaagcggggcaaattttccaacagaaaaggaattattttatggatataagcaatgttcttgaatggattatctacacgacgggcatcatttttgtgctgcccttgtttgttgaaataccagctcatctgcagtggcaatgtggagcaattgctgtttacttctattggatgaatttcttattgtatcttcaaagatttgaaaattgtggaatttttattgttatgttggaggtaattttgaaaactttgttgaggtctacagttgtatttatcttccttcttctggcttttggactcagcttttacatcctcctgaatttacaggatcccttcagctctccattgctttctataatccagaccttcagcatgatgctaggagatatcaattatcgagagtccttcctagaaccatatctgagaaatgaattggcacatccagttctgtcctttgcacaacttgtttccttcacaatatttgtcccaattgtcctcatgaatttacttattggtttggcagttggcgacattgctgaggtccagaaacatgcatcattgaagaggatagctatgcaggtggaacttcataccagcttagagaagaagctgccactttggtttctacgcaaagtggatcagaaatccaccatcgtgtatcccaacaaacccagatctggtgggatgttattccatatattctgttttttattttgcactggggaaataagacaagaaataccaaatgctgataaatctttagaaatggaaatattaaagcagaaataccggctgaaggatcttacttttctcctggaaaaacagcatgagctcattaaactgatcattcagaagatggagatcatctctgagacagaggatgatgatagccattgttcttttcaagacaggtttaagaaagagcagatggaacaaaggaatagcagatggaatactgtgttgagagcagtcaaggcaaaaacacaccatcttgagccttagctcctcagaccttcagtgaggcttctaatggggggtgcatgacttgctggttctaactttcaatttaaaaagagtgaggaagaagcagaatgattcattttgctgcgtgtgaaatcatggttcctgcatgctgtataaaagtaaaccatcttttatcctctattcatattttctaccaatcactatgtattggggatatctttgcagatatgttcaaattggactggactttgatgagatataatctcattatttgaatgggtagaaaatgaatttgctagaacacacatttttaatgaaaagaagtaataaatgtaactattaagctaaaatgcaaatgtcagtactgaattcctgcttgttaattacataatatgtgatgctctagaaaatagtcacaagtattaataatgccttagatgatagtcttaaatattaggttgaggtctacctaacctaagctgcttcctggaaagcttcatgttgaaagaacctatgggtggcaccatgtggacttttctgtccctactgtgatgaatagccccacccttcttgctgtccccaacacacctgatgtcactttgagccatatagttgaagtacaaattaataggccttatgatatgcacgaattttactatagataatatatgttgtttctggttttgtttgccaatgagcataataaatgtaaaacctatatagtatccctgtgattattgtatgagcctttgtttgagatttgaaaacaacatggctccatcacatattcccttttttcttttgatgtctactcaaatcatgaattaatcacatacctcatcattaatcttttcaaggtccttctattgttttgtctgattttctccatcatcctgattagcatgtttattccctcactacccccaggagatattcactgtaatgaatatgtctttggctatgtatgtgtccttgtgttatgttgtacagtgttgttttgagtctgttattatttacacagatgttattatgctatagcttctatttctgtttttgcttcttatttctcttataattctcacttatttcctattttttctactcatttctatttgttactcctttttactggacatgatgtttacaagatacaactgtgttactgtattccatctagtacggggcctttggtgtggcttactatttcattgtgtgcacccacccacccaccacactggacttttctagagatggacagcttggttacctccaccttcctgcactcattctcaaacatactgatgttcatacaaaccagcagagtgctgagggacgatatgtactattacaaaaccagacacttttacattcatggtccaacagatcacatggcctagaggcaatgttgcatataccttaatctttgatatgaataatatctttgttctttatatttcttaaaacagaaagggtggaaaatcactatacagaagcaatatccaaagatctcctgatcataaagacaaggggtcttttcagtcttccctctcctcaaaccttgtgtagcattgcacaatatagatctcagtcaacattcactgagtgccaagaatgtgagaaacactgtaccatgcctgtcatgcgaaatatttaaataaacagattgtcttaca

SEQ ID NO: 161 - DNA, 3129 bp, Homo sapiens
gagtagttctcctgggtccgctctgcgggcttctgggagatgtagtttctggtctgtaggcaggacggaaggagcgggggaggccccttacgcaaactacaattcccggcggggagcgcggtgaagcgggggtgggatctgaacatggcggcggtggtagctgctacggcgctgaagggccggggggcgagaaatgcccgcgtcctccgggggattctcgcaggagccacagctaacaaggcttctcataacaggacccgggccctgcaaagccacagctccccagagggcaaggaggaacctgaacccctatccccggagctggaatacattcccagaaagaggggcaagaaccccatgaaagctgtgggactggcctggtacagcctgtacacccgcacctggctcgggtacctcttctaccgacagcagctgcgcagggctcggaatcgctaccctaaaggccactcgaaaacccagccccgcctcttcaatggagtgaaggtgcttcccatccctgtcctctcggacaactacagctacctcatcatcgacacccaggcccagctggctgtggctgtggacccttcagaccctcgggctgtgcaggcttccattgaaaaggaaggggtcaccttggtcgccattctgtgtactcacaagcactgggaccacagtggagggaaccgtgacctcagccggcggcaccgggactgtcgggtgtacgggagccctcaggacggcatcccctacctcacccatcccctgtgtcatcaagatgtggtcagcgtgggacggcttcagatccgggccctggctacacctggccacacacaaggccatctggtctacctactggatggggagccctacaagggtccctcctgcctcttctcaggggacctgctcttcctctctggctgtgggcggacctttgagggcaatgcagagaccatgctgagctcactggacactgtgctggggctaggggatgacacccttctgtggcctggtcatgagtatgcagaggagaacctgggctttgcaggtgtggtggagcccgagaacctggcccgggagaggaagatgcagtgggtgcagcggcagcggctggagcgcaagggcacgtgcccatctaccctgggagaggagcgctcctacaacccgttcctgagaacccactgcctggcgctacaggaggctctggggccggggccgggccccactggggatgatgactactcccgggcccagctcctggaagagctccgccggctgaaggatatgcacaagagcaagtgatgcccccagcgcccccagcccagcccactccccgcatggggaggccgccaccaccaacacctcatcatccttctcatcgctaacaccaccacctccatcggcacccaagcgggcatcatccccccacactgctcaggggaggggagggatcaggcgatgagactgtgaggccaaaagaagggggcctgttggaggctgggaaccccgcagcgcgaggctgcctcatcaacggcaagaggaaaggaggggtctcgggacatctccagaccctaccaactgggagggtcccctcctccttccctactcctgggacggcagcaaggacatgggggctgctgttagcttctccgtcaggaggcctcatctcactgtagccctggaacccagggtccatcttgcccttcccccatccatggttgggaaagaagctcagcccctcacagtggcctcaagtgtgatgccttacaaaagcaccactcagatgggcagctggactctggtgtcctgagactctgccctcttcccacagcctccctgccccacccatccctgcaaagccatttttcagacagagccattcctaagaacactgaagggctggaatgctggctggccactctctgcctcagtggcctccctacagcctggaagaaggagggtcctgattgccaaggaaacctcctcattgggctaaggagacactggagtctggagtgtggagccccacagtcttgcaggtcacatgctctccttgcacatctggcctggttgtacccactggcctctgcctctgccctgggccaaaagggcccctccttgccaggggagagacagccacggtcctctttggccgatgctgtattctcattttggcccttgttcttaggcccgtctgcccgccttcctccatctaacctttcctgttttatccgcagcccttttcttctttgagttagtaaagatttattctgtaacctgacactcatctggccctttgcagtttgccagccatattcccatgtgatttcccactggatccaggcccccatccggctggcaggagggggctctgacgtgcaggttggaaatcagaagtctgtgagagcgcgggagtgcatggcagctctgggtcccagacctggcccgacccctctgcttcacctccagctctgctgctcctctactcttgggtcgagatccctttggagccacagcgaggaaccctgtggtcctcaggcaggtgtaccttgagtcagccaggagccctcttttcctgtgtcaaagcctgccctcgggctctgctcacctctggtgaccctccaagatgcccctgccctcagtttcccctcatgatctggcctctgcccccttctctagccacagcctctagtacactttagcaataccaccagactagttagagttccccactcaccaagcaagacatgcagtttcatgcctctgtgccttcgctcatgctgtttcttccgactggaatgccttcccctgctcctcctgccttgtctgcctggcaagttcatctctcacgatcccctcaaaggccccctcctccaggaaggcaacccctgtgcccctcccctccaggctacctctgcactttgtcaatgcttctcttgtggcacttatcacactgtattttacttgtttacatgtttgtctccccttctagactgtgaatccttaagggcatggactgtatcttatgcatctctgtatttctgcgcctagcacggtgcctagcacacagtaggcgctcaataaatgttgaatgaatgaatgatttaatcaagaaaaaaaaaaaaaaaa

SEQ ID NO: 162 - DNA, 2551 bp, Homo sapiens
atcagcccaaaggtaggctcaggctccgacggtggccggcgggggtcacgaggcttcgtagtggaggaacgggtttggcgtgtgggacgcagctgcctctgtactggggagtcacggagtggccgggctccagggacatggcggcggcctctgcggtgtcggtgctgctggtggcggcggagaggaaccggtggcatcgtctcccgagcctgctcctgccgccgaggacatgggtgtggaggcaaagaaccatgaagtacacaacagccacaggaagaaacattaccaaggtcctcattgcaaacagaggagaaattgcctgcagggtgatgcgcacagccaaaaaactgggtgtacagactgtggcggtttatagtgaggctgacagaaattccatgcatgtagatatggcagatgaagcatattccatcggccccgctccctcccagcagagctacctatctatggagaaaatcattcaagtggccaagacctctgctgcacaggctatccatccaggatgcggttttctctcagaaaacatggaatttgctgaactttgtaagcaagaaggaattatttttataggccctcctccatctgcaattagagacatgggtataaagagcacatccaaatccataatggctgctgctggagtacctgttgtggagggttatcatggtgaggaccaatcagaccagtgcctgaaggaacacgccaggagaattggctatcctgtcatgattaaagccgtccggggtggaggaggaaaaggaatgaggattgttagatcagaacaagaatttcaagaacagttagagtcagcacggagagaagctaagaagtctttcaatgatgatgctatgctgatcgagaagtttgtagacacaccgaggcatgtagaagtccaggtgtttggtgatcaccatggcaatgctgtgtacttgtttgaaagagactgtagtgtgcagaggcgacatcagaagatcattgaggaggccccagcgcctggtattaaatctgaagtaagaaaaaagctgggagaagctgcagtcagagctgctaaagctgtaaattatgttggagcagggactgtggagtttattatggactcaaaacataatttctgtttcatggagatgaatacaaggctgcaagtggaacatcctgttactgagatgatcacaggaactgacttggtggagtggcagcttagaattgcagcaggagagaagattcctttgagccaggaagaaataactctgcagggccatgccttcgaagctagaatatatgcagaagatcctagcaataacttcatgcctgtggcaggcccattagtgcacctctctactcctcgagcagacccttccaccaggattgaaactggagtacggcaaggagacgaagtttccgtgcattatgaccccatgattgcgaagctggtcgtgtgggcagcagatcgccaggcggcattgacaaaactgaggtacagccttcgtcagtacaatattgttggactgcacaccaacattgacttcttactcaacctgtctggccacccagagtttgaagctgggaacgtgcacactgatttcatccctcaacaccacaaacagttgttgctcagtcggaaggctgcagccaaagagtctttatgccaggcagccctgggtctcatcctcaaggagaaagccatgaccgacactttcactcttcaggcacatgatcaattctctccattttcgtctagcagtggaagaagactgaatatctcgtataccagaaacatgactcttaaagatggtaaaaacaatgtagccatagctgtaacgtataaccatgatgggtcttatagcatgcagattgaagataaaactttccaagtccttggtaatctttacagcgagggagactgcacttacctgaaatgttctgttaatggagttgctagtaaagcgaagctgattatcctggaaaacactatttacctattttccaaggaaggaagtattgagattgacattccagtccccaaatacttatcttctgtgagctcacaagaaactcagggcggccccttagctcctatgactggaaccattgaaaaggtgtttgtcaaagctggagacaaagtgaaagcgggagattccctcatggttatgatcgccatgaagatggagcataccataaagtctccaaaggatggcacagtaaagaaagtgttctacagagaaggtgctcaggccaacagacacactcctttagtcgagtttgaggaggaagaatcagacaaaagggaatcggaataaactccagcaaggaaatggccagttaagtagtgtcttctctctccaccaaaaagaggaagtgcctccagcttttctgggggtctcataaagagcagttttactaaatgattgtatgcttatgctgaacacctttcatattggagaatcatgcatttgggtcactaattatctcaaaatatttcatactaataaagttgaattattttttattggaagccaaaaaaaaaaaaaaaaaa

SEQ ID NO: 163 - DNA, 5021 bp, Homo sapiens
aataaagaaataaaacaggtgtctgaggagaggttctattagagaggggagaatagagagtaattatcgttcagacaggcaagagttctctgcaggtagcagcctgggaaagcgaactcgcgcaccctcttgggggacgggctcttttgctttctatttcttctcctgcagccagggtgcacacgtatttgaaacagaccgaatttcctcctcgatgtggcgtcaggttgacttttcgagactagcgggtatttctttttaatgactccaatgcctttttattattgctgttattgaggttgagggagaagagatcggtctaaattctggctgggtaagtggggggattctcggcgatgagaaacgggggacttagaagccggaggaaaatcagcagccccacatctccacttctccagtccgccctactctccacccgtgacctccagtggagaccccaggcggcagcatcagtatttgatcggcccttcgtcagcacgctgccagccctggccggctgggttcgccaggcatcacccgctcggctctgaagcggacgcctggccctgcaccgggctttggaaggaccctctctgcgctcgccccctccccagggtggctccgctttcgagcccgggcgcggtgcccaccatgcgcggctgcctgcggctcgcgctgctctgcgcgctgccctggctcctgctggcggcgtcgcccgggcacccggcgaaatcccccaggcagcccccggcaccgcgccgcgaccccttcgacgctgccaggggcgccgatttcgatcatgtctacagcggggtggtgaacctcagcaccgagaacatctactctttcaactacaccagccagcccgaccaggtgacagccgtgagggtgtatgtgaacagttcctctgagaatctcaactacccggtccttgttgtggttcgccagcagaaagaggtgctgtcctggcaggttcctctgctcttccaaggactataccagaggagctacaactatcaagaagtgagccgcaccttatgtccctcagaagcaaccaatgagacgggacccttgcagcaactgatatttgtagatgtcgcatccatggcacccctgggtgctcagtacaaactgctagttaccaagctgaagcacttccagctccggacaaatgttgcctttcactttactgccagcccctctcaacctcagtattttctatacaagtttcccaaagacgtggactcagttatcattaaagtggtgtctgaaatggcttatccatgttctgttgtctcagtccagaatatcatgtgcccggtgtatgatctcgaccacaatgtggaatttaatggtgtctatcagtccatgaccaagaaagctgccatcacgctacagaagaaggattttccaggcgagcagttcttcgtggtatttgtgataaagcctgaagattatgcctgtggaggatctttcttcatccaggaaaaggaaaaccagacctggaatctacagcgaaaaaagaaccttgaagtgaccattgtcccttccattaaagaatctgtttatgtgaaatccagtcttttcagtgtcttcatcttcctgtccttctacttgggatgccttcttgttgggtttgttcattatctgaggtttcagagaaaatccattgatggaagctttgggtccaatgatggctctggaaatatggtggcatctcatcccattgctgccagcacacccgaagggagcaattatgggacaatagatgagtcaagctccagtcctggaaggcagatgtcctcctccgatggtgggccaccgggccagtcagacacagacagctccgtggaggagagcgacttcgacaccatgccagacattgagagtgataaaaacatcatccggaccaagatgttcctttacctgtcagatttgtccaggaaggaccggagaattgtcagcaaaaaatataaaatttatttttggaacatcatcaccattgctgtgttttacgcgctgcccgtgatccagctggtcattacctatcagacagtggtaaatgtcactggcaaccaggacatctgttactacaacttcctctgtgctcaccccttgggcgtcctgagtgccttcaacaacattctcagcaatctgggccacgtgcttctgggcttcctcttcctgctgatagtcttgcgccgcgacatcctccatcggagagccctggaagccaaggacatctttgctgtggagtacgggattcccaaacactttggtctcttctacgctatgggcattgcattgatgatggaaggggtgctcagtgcttgctaccatgtctgccctaattattccaacttccaattcgacacctccttcatgtacatgatcgctggcctgtgcatgctgaagctctatcagacccgccacccagacatcaatgccagcgcctactctgcctatgcctcctttgctgtggtcatcatggtcaccgtccttggagtggtgtttggaaaaaatgacgtatggttctgggtcatcttctctgcaatccacgttctggcctcgctagccctcagcacccagatatattatatgggtcgtttcaagatagatttgggaattttccggcgggctgccatggtgttctacacagactgtatccagcagtgtagccgacctctatatatggatagaatggtgttgctggttgtggggaatctggttaactggtccttcgccctctttggattgatataccgccccagggactttgcttcctacatgctgggcatcttcatctgtaaccttttgctgtacctggccttttacatcatcatgaagctccgcagctctgaaaaggtcctcccagtcccgctcttctgcatcgtggccaccgctgtgatgtgggctgccgccctatattttttcttccagaatctcagcagctgggagggaactccggccgaatcccgggagaagaaccgcgagtgcattctgctggatttcttcgatgaccatgacatctggcacttcctctctgctactgctctgtttttctcattcttggttttgttaactttggatgatgaccttgatgtggttcggagagaccagatccctgtcttctgaacctccaacattaagagaggggagggagcgatcaatcttggtgctgtttcacaaaaattacagtgaccacagcaaagtaaccactgccagatgctccactcaccctctgtagagccaactctgcattcacacaggaaggagaggggctgcgggagatttaaacctgcaagaaaggaggcagaaggggagccatgttttgaggacagacgcaaacctgaggagctgagaaacacttgctccttccatctgcagctttgggagtgcaacagggataggcactgcatccaagtcaactcaccatcttggggtccctcccaccctcacggagacttgccagcaatggcagaatgctgctgcacacttccctccagttgtcaccctgcccagaaaggccagcagcttggacttcctgcccagaaactgtgttggcccccttcacacctctgcaacacctgctgctccagcaagaggatgtgattctttagaatatggcggggaggtgaccccaggccctgccctactgggatagatgttttaatggcaccagctagtcacctcccagaagaaactctgtatatttcccccaggtttctgatgccatcagaagggctcaggagtggggtttgtcacacattcctcttaacaagtaactgtcactgggaccgagtcctgggtgcttacatattccttcgtgtcttcatctcactgacctgtgtggacctcatcactctgactctgccttcttggaaaggccctgtcactccacagatgtctggccagcttcaaggcagaaggaaaaacaggaaaagctcttttaacagcagcaggaacaagagaaatgactaaccatactaaaagactggtaacagcagcagcagccagacaggcctcaccttaaggacttgggctgccagagcaaattcagcagagcttatttggcctcccattcacacagctcagttctgtgcccacatcacctttggggaagaaatcagcattctaatcagggacactacttcaggagtcctccacagcgagtccgtcatctgtcactttatgtagatcagggttctagacttcttccctgaggttctcagaagcagctctcaggatgaacgtattgtcctcttcccctcttcttgcaaagtgcacagctaatctaatgttgtctctcggttgcacctgacattctctccccagtaaggtgttggcaagctcagcatctgggttccactctcacactgtctggcagctctgtgtctgagaagttctacattgaccaggcccccttgttgcctggagtatgacgtaatcagaaaatagacgtataaatgtgcacatgcgtatgtatttgcttgtgaaattaaagtcacctcttgcctctgctttcctgatcattcgttagagaaatggatcaggcatttttttaaattattattctttctctaaactatttgcattgtgttcaaaaacccattttagaagtttgaacagcaagcttttcctgattttaaaaacacaaagttgctttcaatgaaatattttgtgatttttttaaagtccccaaatgtgtacttagccttctgttattccttattctttaagcagtgttggcttccattgaccatatgaaggccaccaattaaatggttgtgttaatccaacatgtaaaaaactttttggcagggcacagtggctcacgcctgtaatcccaacactttgggaggctgaggcaggaggatcacttgagcccaggagattgacgccgcagtgaactatgattgtgcccctgcactccagcctggatgacagagtgagaccccatctcttaaaaaataaaaaaaaataaaaatttgaacctgtttcaaaaaaaaaaaaaaaaaaaa

SEQ ID NO: 164 - DNA, 3093 bp, Homo sapiens
agcaagagcagaggcttaaggagctacactgggggaaggacaggggcaagcaggccaaggcctggccggggctcggggggagggaatatggagcaatcccggtcacagcagcgtgggggtgaacaaagctggtggggtagtgacccccagtaccagtatatgccctttgaacactgcaccagctacggactgccctctgagaatgggggcctccagcacaggctccggaaggatgcaggcccccgccacaacgtccaccccacacagatttatggccatcacaaagaacaattctcagacagggagcaggacatagggatgcccaagaagacaggctccagttctaccgtggacagcaaggatgaggatcactattctaaatgtcaagattgtatccaccgcctgggacaggtggtgagaagaaaattaggggaagactggatctttctggtgcttctgggactgctgatggctctggtcagctggagcatggactacgtcagtgccaaaagccttcaggcctacaagtggtcctacgcgcagatgcagcccagccttcctctgcagttcctggtctgggtcaccttcccactagtcctcatcctcttcagcgccctcttctgccacctcatctctccccaggctgttggctctggaatccccgaaatgaagacaatacttcgtggggttgtcctgaaggaatacctcacaatgaaagcctttgtggccaaggttgtcgccctgactgcgggcctgggcagtggcatccccgtggggaaagagggccccttcgtccacattgccagcatctgtgctgctgtcctcagcaaattcatgtctgtgttctgcggggtatatgagcagccatactactactctgatatcctgacggtgggctgtgctgtgggagtcggctgttgttttgggacaccacttggaggagtgctatttagcatcgaggtcacctccacctactttgctgttcggaactactggagaggattctttgcagccacgttcagcgcctttgtgtttcgagtgctggcagtgtggaacaaggatgctgtcaccatcactgctctgttcagaaccaatttccgaatggatttcccctttgacctgaaggaactaccagcttttgctgccatcgggatttgctgtgggctcctgggagctgtatttgtgtatctgcatcgccaagtcatgctcggtgtccgaaagcacaaggccctcagccagtttcttgctaagcaccgcctgctgtatcctggaattgttacctttgtcattgcctcattcaccttcccaccaggaatgggtcaattcatggctggagagttgatgccccgcgaagccatcagtactttgtttgacaacaatacatgggtgaaacacgcgggtgatcctgagagcctgggccagtcagctgtgtggattcacccccgggtcaacgttgtcatcatcatctttctcttcttcgtcatgaagttctggatgtccatcgtggccaccactatgcccataccctgcggaggcttcatgcctgtgtttgtgctaggagctgcatttggaaggctggtaggagaaatcatggccatgctctttcctgatggtattttgtttgatgacatcatctacaagatcctacctgggggctatgcagtaattggagcagcagcgctgactggtgccgtttcccacacagtctccacagctgtgatttgcttcgaattaacgggtcagattgctcacatcctgcccatgatggtggctgttatcttggccaacatggtggcccagagcctgcagccctctctctatgacagcatcatccaggtcaagaagctaccctacttgcctgaccttggctggaaccagctcagcaaatataccatctttgttgaggacatcatggtacgtgatgtgaagtttgtttcagcttcttacacatatggggagttgcgaaccctgctccagaccaccacagtcaagactttaccactggttgactcaaaagattcaatgatcctgctgggctcggtggagcggtcggaactgcaggccctcctgcagcgccacctgtgtcctgagcgcaggctgcgcgcagcccaagagatggcgcggaagttgtcggagctgccttacgacgggaaggcgcggctggctggggaggggctccccggcgcgcctccaggccggcccgagtccttcgcctttgtggatgaggatgaggacgaagacctctctggcaagagcgagcttcctccttcccttgctctccacccctctactactgcccctctgtccccagaagagcccaatgggcctctgcctggccacaaacagcagccggaagcaccagagcctgcaggtcaaagaccctccatcttccagtccctgcttcactgcttgctgggcagagctcgccccacaaagaagaaaacaacccaggattccacagatttagtggataacatgtcacctgaagagattgaggcctgggagcaggagcagctgagccagcctgtctgttttgattcctgctgtattgaccagtctcccttccagctggtggagcagacaaccctgcacaagactcataccctgttttcactccttggcctccacctcgcttacgtgaccagcatggggaagctcaggggcgtcctggccctggaggagctacagaaggccattgaggggcacaccaagtctggggtgcagctccgccctccccttgccagcttccggaacacgacttcaactcgaaagagtaccggggcacctccatcttctgcagagaactggaacctgcctgaggacaggcctggggccactggaacaggggatgtgattgctgcctccccagagacccctgtgccatctccttccccagagccccctctctccctggccccaggcaaggtagagggcgagttggaggagctggagctggtggagagtccagggctggaagaggagctggccgacatcttgcagggccccagcctgcgatccacagacgaggaggatgaggatgaactgatcctttgaccccctcccacgacctcctcataaagaccgtggagaggc

SEQ ID NO: 165 - DNA, 4173 bp, Homo sapiens
acatgatgcccctccctgctcccagccgcttcggtcatgtgaccgcctggggagtcaggggcggaagtcggggtctgacccgctccaggtccgggactgcggatagaagaggaccgccgccttgagggaggggtggaaactgggtgccggctccgcgcgcgacctccggccctgcgcgtgcgccgtggcgcggcccggctgacaggttctttaatggaggagccaatctctctgcacacctggtttcatctaataatatacagacaccagctctgaggccagttaatcatccccagtgtccaggcacagagtagtcggtccgcctcacaatgttggactttctagccgagaacaacctctgtggccaagcaatcctaaggattgtttcctgtggtaatgccatcattgctgaacttttgagactctctgagtttattcctgctgtgttcaggttaaaagacagagctgatcaacagaaatatggagatatcatatttgatttcagctattttaagggtccagaattatgggaaagcaaactggatgctaagccagagctacaggatttagatgaagaatttcgtgaaaacaacatagaaattgtgaccagattttatttagcatttcaaagtgtacataaatatattgtagacttaaacagatatctagatgatctcaatgaaggggtttatattcagcaaaccttagaaactgtgcttctcaatgaagatggaaaacaacttctatgtgaagcactgtacttatatggagttatgctactggtcattgaccaaaagattgaaggagaagtcagagagaggatgctggtttcttactaccgatacagtgctgctcgatcttctgctgattcaaatatggacgatatttgtaagctgcttcgaagtacaggttattctagccaaccaggtgccaaaagaccatccaactatcccgagagctatttccagagagtgcctatcaacgaatccttcatcagtatggtcattggtcgactgagatctgatgatatttacaaccaggtctcagcgtatcctttgccggagcatcgcagcacagccctggcaaaccaagctgccatgctgtacgtgattctctactttgagccttccatccttcacacccatcaagcaaaaatgagagagatagtggataaatactttccagataattgggtaattagtatttacatggggatcacagttaatctagtagatgcttgggaaccttacaaagctgcaaaaactgctttaaataataccctggacctttcaaatgtcagagaacaggcaagcagatatgctactgtcagtgaaagagtgcatgctcaagtgcagcaatttctaaaagaaggttatttaagggaggagatggttctggacaatatcccaaagcttctgaactgcctgagagactgcaatgttgccatccgatggctgatgcttcatacagcagactcagcctgtgacccaaacaacaaacgccttcgtcaaatcaaggaccagattctaacagactctcggtacaatcccaggatcctcttccagctgctgttagatactgcacaatttgagtttatactcaaagagatgttcaagcaaatgctttcagaaaagcaaaccaaatgggagcattacaagaaagagggttcggagcggatgactgagcttgctgatgtcttttcaggagtgaaacccctaaccagagtggagaaaaatgaaaaccttcaagcttggttcagagagatctcaaaacaaatattgtctttaaattatgatgattctactgctgcgggcagaaaaactgtacaactgatacaagctttggaagaggttcaagaattccaccagttggaatccaatctgcaagtatgtcagtttcttgccgatactcgaaagtttcttcatcaaatgatcagaaccattaacattaaagaggaggttctgatcacaatgcagatcgttggggacctttctttcgcttggcagttgattgacagtttcacatccatcatgcaagaaagcataagggtaaatccatccatggttactaaactcagagctaccttcctaaagcttgcctctgccctcgatctgccccttcttcgtattaatcaggcaaatagccccgacctgctcagcgtgtcacagtactattctggagagttggtatcctatgtgagaaaagttttgcagatcatcccagaaagcatgtttacatctcttctaaagatcataaagcttcagacccacgacattattgaagtgcctacccgcctggacaaagacaagctgagggactatgctcagctaggcccacgatacgaggttgccaagcttactcatgctatttccatttttactgaaggcatcttaatgatgaaaacgactttggttggcatcatcaaggtggatccaaagcagttgctggaagatggaataaggaaagagcttgtgaagcgcgttgcctttgccctgcataggggactgatattcaaccctcgagccaagccaagtgaattgatgcccaagctgaaagagttgggagcgaccatggatggattccatcgttcttttgaatacatacaggactatgtcaacatttatggtctgaagatttggcaggaagaagtatctcgtatcataaattacaacgtggagcaagagtgtaataactttctaagaacgaagattcaagattggcaaagcatgtaccagtccactcatattccaatacccaagtttacccctgtggatgagtctgtaacgtttattggtcgactctgcagagaaatcctgcggatcacagacccaaaaatgacatgtcacatagaccagctgaacacttggtatgatatgaaaactcatcaggaagtgaccagcagccgcctcttctcagaaatccagaccaccttgggaacctttggtctaaatggcttagacaggcttctgtgctttatgattgtaaaagagttacagaatttcctcagtatgtttcagaaaattatcctgagagacagaactgttcaggacactttaaaaaccctcatgaatgctgtcagtcccctaaaaagtattgtcgcaaattcaaataaaatttatttttccgccattgccaaaacacagaagatttggactgcgtatctcgaggctataatgaaggttgggcagatgcagattctgagacaacagattgccaatgaattaaattattcttgtcggtttgattctaaacatctggcagctgctctggagaatctcaataaggctctcctagcagacattgaagcccactatcaggacccttcacttccttaccccaaagaagataacacacttttatatgaaatcacagcctatctggaggcagctggcattcacaacccactgaataagatatacataacaacaaagcgcttaccctattttccaattgtaaactttctatttttgatcgctcagttgccaaaacttcaatacaacaaaaatctgggaatggtctgccgaaaaccgaccgacccggttgattggccaccacttgtcctgggactgctcactctgctgaagcagttccattcccggtacaccgagcagttcctggcgctgattggccagtttatctgctccacggtggagcagtgtacaagccagaagatacctgaaattcctgcagatgttgtgggtgcccttctgttcctggaggattatgttcggtacacaaagctacccaggagggttgctgaagcacatgtgcctaatttcatttttgatgagttcagaacagtgctgtaactgtttttcctacttcttcaatggaaggattgtccttagatcttcccaccatcacaaatgaatttgaagatgaaaagaaactcagttgctcatacaactgcattttttctgtctattatgggaaacatcagacgttctgagtaagatatatctcatggcattagttaatataactgatattgtttaaatcatggtattacatgcaatttatatcagataaaagcagaacacatttttgtactgcctctcttaaatgctgaatgtaactgttatgtataaatccatttagttttatgttctaaagaactatttgtgcaactccagattttcagtaaaatagtattactagtacccaaaaaaaaaa

SEQ ID NO: 166 - DNA, 6202 bp, Homo sapiens
gctaaatgtgaacaataatgtcttggaagagaaattatttttcagggggtcgtggtagtgtacaagggatgtttgcacctcgaagctcaacctccatagcccccagcaaaggcctcagcaatgagccagggcaaaacagctgcttcctcaacagtgccctgcaggttttgtggcacttggatatcttccgacgtagctttaggcagcttacaactcacaagtgcatgggagattcctgcatcttttgcgctctcaagggaatctttaaccagtttcagtgtagtagtgaaaaagtgcttccatctgacactctccgcagtgctctggcaaagactttccaggatgaacaacgtttccagctgggaattatggatgatgctgcagagtgctttgaaaacctcctgatgagaattcacttccacattgctgatgaaaccaaagaggatatatgtactgcccaacactgcatttcccatcagaaatttgcaatgacattgtttgagcagtgtgtatgtactagctgtggtgccacttctgatccgctgcctttcatccagatggtacattatatctccaccacttccctttgcaatcaggctatttgtatgctggaaagacgagagaaaccttcaccaagcatgtttggtgagctgctgcagaatgccagcaccatgggggatctgcggaactgtccaagcaactgtggagagaggatcaggattcgccgtgtgttgatgaatgctccacagattatcacgattgggctggtatgggactcagaccactcagacttagcagaagatgttatccacagcctgggaacctgccttaagctgggtgatctgtttttcagagtgacggatgaccgggccaagcaatctgaactgtacttagttggaatgatctgttactatggcaaacattattctacattcttttttcaaacaaagattcgcaaatggatgtattttgatgatgctcatgtcaaggagattgggcccaaatggaaggatgtggtgaccaaatgcatcaaggggcattatcagcccctgctgctgctttatgcagatccccagggtaccccagtttccacccaggacctgcctccccaagctgagttccagtcatacagcaggacatgctacgacagtgaagattcagggagggagccctccatctcaagtgacactcgaacagattcctcaacggagagctatccctacaaacattcccaccatgagtctgtggtcagtcacttctcttctgattctcaggggacagtcatctataatgtggaaaatgattccatgtctcagagcagtcgggacacaggacacctgactgatagtgaatgtaatcagaaacacacatccaagaaagggtcactgatagagcgcaagaggagctctggtcgggttaggaggaaaggcgatgagccccaggcctcgggataccacagtgaaggagaaacactgaaagagaagcaggctcctagaaatgcctccaaaccatccagcagcaccaacaggctgagagattttaaagagacagtcagcaatatgatccataacagaccatccctggcttctcagaccaatgtaggctctcactgcaggggcagaggaggagaccagcctgacaaaaaacctcctaggaccctgcctttacactctcgtgactgggaaatagagagtaccagcagtgagtcaaaatccagttcttccagcaagtatcgtcccacatggagacccaaacgagaatctctgaatattgacagtatctttagtaaggacaaaaggaagcactgtggctatacccagcttagccccttttctgaggattcagctaaagaatttataccagatgaaccaagcaagccaccttcttacgacattaaatttggtggaccaagcccccagtacaagcgctggggcccagcacggccaggctctcaccttttagagcagcacccccgactaatccagcgaatggaatctggctatgaaagcagtgagaggaacagcagcagccctgtcagcctggatgcagccctgcctgagagctcaaatgtctacagggatccaagtgctaagagatcagctgggttggttccttcctggcgtcatatcccaaagtcgcacagcagtagcatcctggaggtagactccacagcatccatgggtggctggacaaagagtcagcctttctctggtgaggagatatcttctaaaagtgaactggatgaattgcaggaagaggtggccaggagggcgcaggaacaggaacttcgaagaaaacgggagaaggagttagaggcagcgaaagggtttaaccctcatcctagccgcttcatggacttggatgaactgcagaatcaggggaggagtgacggctttgagaggtccctgcaagaggcagagtcagtgtttgaagagtcactacatctggaacagaaaggagactgtgctgcagctttggctctctgtaatgaagctatctctaaactaagacttgccctgcatggtgccagctgtagcacgcacagcagagccctagtcgataagaagttgcaaatcagtattcgaaaagcacggagcctgcaggatcgcatgcagcagcagcaatcaccacagcagccgtcgcagccctcagcctgcctcccaacacaggcggggactctctctcagccaacaagtgaacagcctatcccgctccaagtattgttaagccaagaggcccaactggaatccggcatggatacagagtttggggccagttctttcttccattcacctgcttcctgccatgagtcacactcatcactatctccagagtcatctgccccacagcacagctcccccagtagatctgccttgaagcttctgacttcggttgaagtagacaacattgaaccctctgcattccacaggcaaggtttacctaaagcaccagggtggactgagaagaattctcatcatagttgggagccattggatgccccagagggtaagctgcaaggctctaggtgtgacaacagcagttgcagcaagctccctccacaagaaggaagaggcattgctcaagaacagctgttccaagaaaagaaggatcctgctaacccctccccggtgatgcctggaatagccacctctgagaggggtgatgaacacagcctaggctgtagtccttcaaattcatcagctcagcccagccttcccctgtatagaacctgccaccccataatgcctgttgcttcttcatttgtgcttcactgtcctgatcctgtgcagaaaactaaccaatgcctccaaggccaaagcctcaaaacttcattgactttaaaagtggacagaggcagtgaggagacctataggccagagtttcccagcacaaaggggcttgtccgttctctggctgagcagttccagaggatgcagggtgtctccatgagggatagtacaggtttcaaggatagaagtttgtcaggtagtctaaggaagaactcttccccttctgattctaagcctcctttctcacagggtcaagagaaaggccactggccatgggcaaagcaacaatcctctctggagggtggggatagaccactttcctgggaagagtccactgaacattcttctcttgccttaaactctgggctgcctaatggtgaaacttctagcggaggacagcccaggttggcagagccagacatataccaagagaagctgtcccaagtgagagatgttaggtctaaggatctgggcagcagtactgacttggggacttccttgcctttggattcctgggtgaatatcacaaggttctgtgattctcagcttaagcatggggcacctaggccaggaatgaagtcctcccctcatgattcccatacgtgtgtaacctatccagagagaaatcacatccttttgcatccacattggaaccaagacacagagcaggagacctcagaattggagtctctgtatcaggccagtcttcaggcttctcaagctggctgttctggatgggggcagcaggataccgcctggcacccacttagccaaacaggctctgcagatggcatggggaggaggttgcactcagcccatgatcctggtctctcaaagacttcaacagcagaaatggagcatggtctccatgaagccagaacagtgcgtacttctcaggctacaccttgccgaggcctcagcagggagtgtggggaggatgagcagtacagtgcagagaatttacgtcgcatctcacgcagtctcagtggcaccgttgtctcagagagggaggaagctccggtttcttcccacagttttgattcatcaaacgtgaggaagcctttggaaaccgggcaccgttgttccagctcctcttccctccctgtcatccatgacccttctgtgtttctcctcggtccccaactctaccttccccaaccacagttcctgtccccagatgtcctgatgcccaccatggcaggggagcccaatagactcccaggaacttcaaggagtgtccagcagtttctggctatgtgtgacaggggtgaaacttcccaaggggccaagtacacaggaaggactttgaactaccagagcctcccccatcgctccagaacagacaactcctgggcaccctggtcagagaccaaccagcatattgggaccagattcctgactactccagggtgcaatcctcaactaacctacactgccacactaccagaaagaagcaagggccttcaggttcctcacactcagtcctggagtgatcttttccattcaccctcccaccctcccattgttcatcctgtgtacccaccatctagcagtcttcatgtacccctgaggtcagcttggaattcagatcctgttccagggtcccgaacccctggtcctcgaagagtagatatgcccccagatgatgactggaggcaaagcagttatgcctcccactctggacacaggagaacagtgggagaggggtttctgtttgttctatcagatgctcccagaagagagcagatcagggctagagtcctgcagcacagtcaatggtaaaggttattcctttcctttcctggagctacacctttctttgtaaaactgtactgtgggccgggcgcggtggctcacacctgtaatcccagcactttgggaggctgaggcgggtggatcacgaggtcaggagattgagaccatcctggccaacatggtgaaaccccgtctctaccaaaatacaaaaaattagccaggcgtgacggtgcgtgcctgtagtcccaactactcggaaggctgaggcaggagaattgcttgaacccgggaggcagaggttgcagtgagccgagatcgcaccactgcactccagcttggcaatagagtgagactccatctcaaaaaacaaaacaaaacaacaacaaaataaactactgtggcagcgttggtaccctgcatcactgccatggttgtgctattctcatctcaacatagaattggtgggttctcctaagggtgtcaggaacctctaaaaagatgtgattctttgggaggggatatttgaaattccaacttccattccccctagcaaaaggaagcagctgctgtttaagggttttatctgagccactttaaagatgaatccatggtattactctggatactagccattccttaggattttaaggtcacattttattcctggatgctttatgtccccacctccacctgagccctcatcctctgttccctactatactcccaacttctactctttgttttatccacctatccctattacctgaccctttgtcttccctgtctcccatccttggggggacatgtagccctgtggtcatggttctgatgacatcatcagggcagcccccctgcccaggtattatggcctgtcagcattccctgtgccctccaaaccttaggcctagaatgcggagctgccaacataacattcacccttttgaacagatggagtcaggcacactaacacagccttctgtcctcaataacacagccattattgccacttgctcagtcgtcaatgtaaaccctcagagtcagctgaactattttaggccaaacatactgtttttgtaaagtatttttcattaataaatctataagacagttctatttaaaaaaaaaaaaaaaaaaaaaaaaaaaaaaaaaaaaaaaaa

SEQ ID NO: 167 - DNA, 2643 bp, Homo sapiens
gtttttccgggagagaccacgcttcccctcaagctccccaacggctccgccttcccgccggagcctgacccttcccagagtgcccggcgattccggcgtgcgaggcccttggagggcaaggccccagggcctggcttaggagcgcgagaggcaggctgggaattgtagttcgaaggccctcgagagcggctagagtctggcggccgagaggactagttgtcccagcgtgccctgcgcctcagcccgcgcgctcgcagcttctcgctctcgcctgcctgcccgctcccttgcttgctcgcgctttcgctcgccctctcctcgaggatcgaggggactctgaccacagcctgtggctgggaagggagacagaggcggcggcggctcaggggaaacgaggctgcagtggtggtagtaggaagatgtcgggcgaggacgagcaacaggagcaaactatcgctgaggacctggtcgtgaccaagtataagatggggggcgacatcgccaacagggtacttcggtccttggtggaagcatctagctcaggtgtgtcggtactgagcctgtgtgagaaaggtgatgccatgattatggaagaaacagggaaaatcttcaagaaagaaaaggaaatgaagaaaggtattgcttttcccaccagcatttcggtaaataactgtgtatgtcacttctcccctttgaagagcgaccaggattatattctcaaggaaggtgacttggtaaaaattgaccttggggtccatgtggatggcttcatcgctaatgtagctcacacttttgtggttgatgtagctcaggggacccaagtaacagggaggaaagcagatgttattaaggcagctcacctttgtgctgaagctgccctacgcctggtcaaacctggaaatcagaacacacaagtgacagaagcctggaacaaagttgcccactcatttaactgcacgccaatagaaggtatgctgtcacaccagttgaagcagcatgtcatcgatggagaaaaaaccattatccagaatcccacagaccagcagaagaaggaccatgaaaaagctgaatttgaggtacatgaagtatatgctgtggatgttctcgtcagctcaggagagggcaaggccaaggatgcaggacagagaaccactatttacaaacgagacccctctaaacagtatggactgaaaatgaaaacttcacgtgccttcttcagtgaggtggaaaggcgttttgatgccatgccgtttactttaagagcatttgaagatgagaagaaggctcggatgggtgtggtggagtgcgccaaacatgaactgctgcaaccatttaatgttctctatgagaaggagggtgaatttgttgcccagtttaaatttacagttctgctcatgcccaatggccccatgcggataaccagtggtcccttcgagcctgacctctacaagtctgagatggaggtccaggatgcagagctaaaggccctcctccagagttctgcaagtcgaaaaacccagaaaaagaaaaaaaagaaggcctccaagactgcagagaatgccaccagtggggaaacattagaagaaaatgaagctggggactgaggtgggtcccatctccccagcttgctgctcctgcctcatccccttcccaccaaaccccagactctgtgaagtgcagttcttctccacctaggaccgccagcagagcggggggatctccctgcccccaccccagttccccaacccactcccttccaacaacaaccagctccaactgactctggtcttgggaggtgaggcttcccaaccacggaagactactttaaatgaaaaaaagaaattgaataataaaatcaggagtcaaaattcatcgtcttcaagcccctctttctagccttttctactactctctgcttggtcaaggtttgtgccccactacagaacagggctaaattagccaccaccactgaaaactcagccgaatttttttataccactctgatgtcagcattttttccatctgtttggggctttttcctcttttttccattctccccaaatattttatctggcttcaaaattaagaggattatttttcagattgtttttattcagtgtggccgattcctcatctgattcaggctgtccagtcaggcccctcccattttaggagctggagccttcatttatgaagagattctcatctatgaaatggatcctcatttgtaaatcttttttcttccattttcacaaagctgtaaagaaataatccatctcaaccttaccctttttctctggagtcagtggggtctttcctcgctccatcttacacagacctgagctggaagctcaactggttttgttccctgtttgaaatattgtgatctccctcccatgaaagaaaaaccaagaaccagaggcgtagactgactgaagacacaactcctggctttctgaagctatggacttggattggattgctgggggtttgtagagaaaggtgacaaatttcagtacctctggcatgctgtcccaggaaactagggctcccactaacttatgaggtttttaaacacattgaaaatgacatgacattaaaataaatttggatttgctcataatgaaaaaaaaaaaaaaaaaa

SEQ ID NO: 168 - DNA, 5187 bp, Homo sapiens
agtttcactgggctcagcggtgcctgcgctttagcgcagacgcgcgggtgagatcctcacttcccacaggacctcgggacgggggcggggctccgacagaggcggcgattgtggcggcccatttgtaaatgctgcggagattgaggtgtcggttcgtgctgctgagctgcccaggcttcacggagcggtgttggaaatcaatagctcttctagcctttgcattgtttaaatataatagtgtcattggactaagatgttcctgatgccaacctcttcagagttaaacagtgggcagaacttcctaacccagtggatgaccaatccttctcgggctggggtcatattaaatcgtggatttcctattttggaagcagacaaagagaagcgagcagctgtggacatttctaccagctttcctattaaaggcacacatttttctgatagcttcagctttataaatgaagaagattcacttcttgaagaacagaagttggagtcaaacaacccttacaaaccacagtcagataaatctgaaacccatacagcctttccttgcattaaaaagggaccacaggtagcggcatgtcacagtgctcctggacaccaggaagaaaacaaaaatgacttcatcccagatcttgcgagtgaattcaaagaaggggcttataaagacccactttttaaaaaacttgaacagctgaaagaagtacaacagaagaagcaggaacaattgaagaggcaacagttggagcaactacagagactcatggaagaacaagagaagctgctcaccatggtgtctgggcagtgcacacttccaggtttgagtttactgcctgatgatcagagccagaagcacaggtctccaggaaataccaccactggagagagagccacatgctgcttcccatcatatgtctacccggacccaacccaggaagaaacatacccgtccaacattttatcccatgagcaaagcaacttctgtagaactgctcatggagattttgtcttaacttcaaaacgtgcgtctcctaatttattttctgaggcacagtatcaagaagcacctgtggaaaaaaataatttaaaagaagaaaaccgtaaccatcctacaggagaaagtatcttatgttgggagaaagtgacagaacagattcaggaagcaaatgataagaacttacaaaaacatgatgattcctcagaagtggctaatattgaagaaaggcccattaaagctgctattggagaaaggaaacagacctttgaagattacttagaagaacaaattcagttggaagagcaagaactgaagcaaaaacagctgaaggaagcagaaggaccattgccaatcaaagcaaaaccaaaacaaccatttttaaaacgaggagaaggtttagctagatttactaatgccaaatctaagtttcaaaaaggcaaagaaagtaaactagtgactaaccagagcacttccgaggaccagccgctgtttaaaatggatagacagcaactccagcggaaaaccgctcttaaaaataaagagctgtgtgcagacaaccctatccttaaaaaggacagtaaagctagaaccaagagtggttctgtcaccctcagtcagaagccgaaaatgctgaagtgtagtaacaggaaaagtctttctccgtcaggattgaaaatacagacggggaagaaatgtgatgggcagtttagagaccagatcaaatttgaaaacaaagtcacatctaataataaagaaaatgtaactgagtgtccaaaaccttgcgatactggctgcacagggtggaataagacacaaggtaaagacagacttcctctttcaacagggccggccagccggctggctgctaagagccccataagggagaccatgaaagagtctgaatcttctcttgacgtttctcttcagaaaaagttagagacttgggaacgagaaaaggaaaaggaaaatttggaattagatgaatttttgtttttagaacaagctgctgatgaaatatcattttctagtaattcctcatttgtactgaaaatcttagaaagggatcaacagatctgcaaaggtcaccggatgtcttccacccctgtcaaagctgtgccacagaagacaaatccggcagatcccattagtcattgtaaccgcagtgaggatttggaccacactgcacgtgagaaggagagtgagtgtgaagtcgcacccaaacaacttcattcattgtcctcagctgatgaattgagggaacagccttgtaaaatcaggaaagccgtccaaaagagcacttctgaaaatcagactgaatggaatgcacgtgacgatgaaggtgttccaaatagtgacagtagcactgactctgaggaacagcttgatgttaccataaaaccatcgactgaggatagagagaggggcatcagcagcagagaggatagcccacaagtctgtgatgataaggggccttttaaggacaccaggacccaagaagataaaaggagagatgttgatctggatttgtctgataaagattacagtagcgatgagtctatcatggaaagcataaaacataaagtgtctgagccctcgagatcctcatccctaagtctgagtaaaatggactttgatgatgaaagaacttggactgaccttgaagagaatttgtgtaaccatgatgttgttcttgggaatgaatccacttatgggacgccgcagacatgctaccctaataatgaaataggtatcctggacaaaacaataaaaaggaagattgcaccagtcaagaggggagaagacttgagcaagtccaggaggagcagaagtcctcctacatcggagctgatgatgaaattctttccttctttgaaaccaaaaccaaagtcagattcacacttgggaaatgaactcaagttaaacataagtcaagaccaaccacctggtgacaatgctcgatcccaggttttgagagagaaaattattgaattggaaacagaaatagaaaagtttaaagctgagaacgcatctttagctaaacttcgcattgaacgagaaagtgccttggaaaaactcaggaaagaaattgcagacttcgaacaacagaaagcaaaagaattagctcgaatagaagagtttaaaaaggaggagatgaggaagctacaaaaggaacgtaaagtttttgaaaagtatactacagctgcaagaacttttccagataaaaaggaacgtgaagaaatacagactttaaaacagcaaatagcagatttacgggaagatttgaaaagaaaggaaaccaaatggtcaagtacacacagccgtctcagaagccagatacaaatgttagtcagagagaacacagacctccgggaagaaataaaagtgatggaaagattccgactggatgcctggaagagagcagaagccatagagagcagcctcgaggtggagaagaaggacaagcttgcgaacacatctgttcgatttcaaaacagtcagatttcttcaggaacccaggtagaaaaatacaagaaaaattatcttccaatgcaaggcaatccacctcgaagatccaagtctgcacctcctcgtgatttaggcaatttggataagggacaagctgcctctcccagggagccacttgaaccactgaacttcccagatcctgaatataaagaggaggaggaagaccaagacatacagggagaaatcagtcatcctgatggaaaggtggaaaaggtttataagaatgggtgccgtgttatactgtttcccaatggaactcgaaaggaagtgagtgcagatgggaagaccatcactgtcactttctttaatggtgacgtgaagcaggtcatgccagaccaaagagtgatctactactatgcagctgcccagaccactcacacgacatacccggagggactggaagtcttacatttctcaagtggacaaatagaaaaacattacccagatggaagaaaagaaatcacgtttcctgaccagactgttaaaaacttatttcctgatggacaagaagaaagcattttcccagatggtacaattgtcagagtacaacgtgatggcaacaaactcatagagtttaataatggccaaagagaactacatactgcccagttcaagagacgggaatacccagatggcactgttaaaaccgtatatgcaaacggtcatcaagaaacgaagtacagatccggtcggataagagttaaggacaaggagggtaatgtgctaatggacacggagctgtgacgatcctcatgtgatcatgaagtaacagtaactgactttttatgttaaaaaatgtacatttactgtggattctgtttaatttattgtgtatgtgtggggaaaagattagattctaaaataaaagtttaccctgtggcatcttcatttttatattctttgaaatgcaatgatagctctcatttataattcactaccctgtctttcaatagactaaggaaagcattttgactgtttagaaattgtgtacaggtttttacagtaagtgggtgtgtttattggttagaaatggctataaaaaaaaaccaagaagtacaggaagtacatcacctagatgtcccacagacacatcagccgtagagcactggacttgtacagaaggtgtactcaaggagtaaacacgtgtctctgtagccaaaatattactatgttcagttagtaccaaaattagaccatttgatcttctacagaggatcattaattattataacagaatgggaagttacaacagtggatgaatataaataggtcacacacaacaggtagtaatcatggtgaagagaaagcagttataacaaggctgactttgtaatgtaatgtctcaaaatgggatacttgagagtggaggggggcatgaacgatgactagccagtgttaacccatggaccacagctaccctgatgttaccacagtgagattactgtagcctcatggaagcaagatgtccctgaaggatgggcaagtcacttacttacttacttgtaaatttatataataaataattacagattggtctagatagaccttacctgtcacatatactatgaatcaggttttgttaatgaaatctatcaattccaggtgacttaactgaatatgaaaaataaaactttttgaagaatataaaaaaaaaaaaaaaa

SEQ ID NO: 169 - DNA, 3431 bp, Homo sapiens
agcacgccttttccgctagtcgccccgctctatcccatagtctcgctgccctgagcctcccgtgccggccggccggccgggggaacaggcgggcgctcggggggcgctcggggggcggggggagttccggttccggttctttgtgcggctgcatcggcggctccgggaagatggcggcccgggcgggtttccagtctgtggctccaagcggcggcgccggagcctcaggaggggcgggcgcggctgctgccttgggcccgggcggaactccggggcctcctgtgcgaatgggcccggctccgggtcaagggctgtaccgctccccgatgcccggagcggcctatccgagaccaggtatgttgccaggcagccgaatgacacctcagggaccttccatgggaccccctggctatggggggaacccttcagtccgacctggcctggcccagtcagggatggatcagtcccgcaagagacctgcccctcagcagatccagcaggtccagcagcaggcggtccaaaatcgaaaccacaatgcaaagaaaaagaagatggctgacaaaattctacctcaaaggattcgtgaactggtaccagaatcccaggcctatatggatctcttggcttttgaaaggaaactggaccagactatcatgaggaaacggctagatatccaagaggccttgaaacgtcccatcaagcaaaaacggaagctgcgaattttcatttctaacactttcaatccggctaagtcagatgccgaggatggggaagggacggtggcttcctgggagcttcgggtagaaggacggctcctggaggattcagccttgtccaaatatgatgccactaaacaaaagaggaagttctcttccttttttaagtccttggtgattgaactggacaaagacctgtatgggccagacaaccatctggtagaatggcacaggaccgccactacccaggagaccgatggctttcaggtgaagcggccgggagacgtgaatgtacggtgtactgtcctactgatgctggattaccagcctccccagtttaaattagacccccgcctagctcgactcctgggcatccatacccagactcgtccagtgatcatccaagcactgtggcaatatattaagacacataagctccaggaccctcacgagcgggagtttgtcatctgtgacaagtacctgcagcagatctttgagtctcaacgtatgaagttttcagagatccctcagcggctccatgccttgcttatgccaccagaacctatcatcattaatcatgtcatcagtgttgacccgaatgatcagaaaaagacagcttgttatgacattgatgttgaagtggatgacaccttgaagacccagatgaattcttttctgctgtccactgccagccaacaggagattgctactctagacaacaagatccatgagacaatagaaaccatcaaccagctgaagactcagcgggagttcatgctgagctttgccagagaccctcagggtttcatcaatgactggcttcagtcccagtgcagggacctcaagacaatgactgatgtggtgggtaacccagaggaggagcgccgagctgagttctacttccagccctgggctcaggaggctgtgtgccgatacttctactccaaggtgcagcagagacgacaagaattagagcaagccctgggaatccggaatacatagggcctctcccacagccctgattcgactgcaccaattcttgatttgggccctgtgctgcctgcctcatagtatctgccttggtcttgcttggggcgttccaggggatgctgttggttcaaggacaacaccagaatgaagagggtctcacaagacacctgttatcctcttctttcaccctatctcttcccacccccagcttccctttgccccacaaagttcccatgtgcctgtaccctcccctggtctacataggacctctagatagtgttagagagagaacatgtagtggtaatgagtgcttggaatggattgggcctcaggccaggtggtcttcaaggggaccagctaactgatcctgcccttcagagacccaggagttgggagctttcgctccttctccaagactcaggcctgtgggcactctataagctagttgatcttggctctcctgataacagaatccaatttccttccttccctccacaggtttggaacaaactctcccttcacttgttgccctgtagcactacagaaaccctggttcttgggctccactgagccccaggtcagtccccagccctctgggttggcctgctgtcagtgcttctctcactccttagttggggtccacatcagtattggagttttgttctttattgctccctcccagacactccctgtggctgccctttgtgattccctcagatctgccctaatcccgggcatttgggtgggggaatcttgcctttccctttcagagccccagggatctcatctggggaactgtcattgccagcagaggctgttccttcctgctgtttggagatgtgactcattcattcactcactccaccctgcctctgcatcccttaatggagaaacgggcctaaaaccaaacgggtaaaaagccctgggccatccctgtcttcctgtcccttgtctgcccagttgacacctactggtgacttctagggcactgaggagtgaaagcgcctagggctggagaatagcgctgagttgggtttgtgactcttccctctccctgcctcacaggattgtgactccccagcccctgccctcaaagcttcagacccctcaggtagcagcaggaccttgtgatcttggccccttggatctgagatggtttttgcatctttccaggagagcctcacattcttcttccaggttgtatcacccccgagttagcatatcccaggctcgcagactcaacacagcaagggtgggagacagctgggcacaaagggggaattccgttcagcatgggctctaaacccacagaactgacaaagcccctgcttccccaccccctcctcaggctcctgcgagcacacccccacccccaaatccctccctgttctacactggggacagcagaattttctccccgtcttccccttcctgccattttccctcccttgaaaggttgacactggacaaccttggggcagctgagccctggccgcctcctggctggaaccatgagaaggaagctcagtacttcccacagtgtccctgttgataactgtttttattaactgaattgtttttttcatggaccaaacttttttttgtactgtccccttattgatgttacccagttttaataaaagaatcttctgaaggatgggtcctcctacctactgtgagagagctcttccctgagctcttcttccttcaataccattagccaaa

SEQ ID NO: 170 - DNA, 1864 bp, Homo sapiens
gggggctgcggcaacagcggggccgatgtgtagttggtgactgcctctccagatgctgaggtgcctgtatcattggcacaggccagtgctgaaccgtaggtggagtaggctgtgccttctgaagcagtatctattcacaatgaagttgcagtctcccgaattccagtcacttttcacagaaggactgaagagtctgacagaattatttgtcaaagagaatcacgaattaagaatagcaggaggagcagtgagggatttattaaatggagtaaagcctcaggatatagattttgccaccactgctacccctactcaaatgaaggagatgtttcagtcggctgggattcggatgataaacaacagaggagaaaagcacggaacaattactgccaggcttcatgaagaaaattttgagattactacactacggattgatgtcaccactgatggaagacatgctgaggtagaatttacaactgactggcagaaagatgcggaacgcagagatctcactataaattctatgtttttaggttttgatggcactttatttgactactttaatggttatgaagatttaaaaaataagaaagttagatttgttggacatgctaaacagagaatacaagaggattatcttagaattttaagatacttcaggttttatgggagaattgtagacaaacctggtgaccatgatcctgagactttggaagcaattgcagaaaatgcaaaaggcttggctggaatatcaggagaaaggatttgggtggaactgaaaaaaattcttgttggtaaccatgtaaatcatttgattcaccttatctatgatcttgatgtggctccttatataggtttacctgctaatgcaagtttagaagaatttgacaaagtcagtaaaaatgttgatggtttttcaccaaagccagtgactcttttggcctcattattcaaagtacaagatgatgtcacaaaattggatttgaggttgaagatcgcgaaagaggagaaaaaccttggcttatttatagttaaaaataggaaagatttaattaaagcaacagatagttcagacccattgaaaccctatcaagacttcattatagattctagggaacctgatgcaactactcgtgtatgtgaactactgaagtaccaaggagagcactgtctcctaaaggaaatgcagcagtggtccattcctccatttcctgtaagtggccatgacatcagaaaagtgggcatttcttcaggaaaagaaattggggctctattacaacagttgcgagaacagtggaaaaaaagtggttaccaaatggaaaaagatgaacttctgagttacataaagaagacctaaaactgatggctactaaaaagcagagcatttctgccagtcataacatctttgtactctatgagcaaatagtaattttggaccttgataaaacaattttgtagagtgtaatatttctaagaggaaatgtcacaggggctatgatgcaagaaagcctcagaaatgactgcatacaggaaataatctcatcatttccaaagatgtcttcatgtcccatcaatgacatgctaccagacatatcagattccacaggataatggcaccaagctacccaagtagatgtttctggtattctagactgccgttcatgcttgtttcctaaagtatacttaaaagtttcaaatacagtttcacttagaaactgcaaccctccaagtaatgttatgtttacttaggtattaatgttatgtttacttaggtatgtatcagaggcaataatttccaaagcagatcttagaatataaccaatttgttagataacaaaaaaaaaaaaaaaaaaaaaaaaaaaaa

SEQ ID NO: 171 - DNA, 1104 bp, Homo sapiens
gggcttgtgggtctttgagacccgaaaattgagagcgttttcgcactccagcggctgctcctggcggctctgcggccgtcaccatgccacagaatgaatatattgaattacaccgtaaacgctatggataccgtttggattaccatgagaaaaagagaaagaaggaaagtcgagaggctcatgaacgttcaaagaaggcaaagaaaatgattggtctgaaggctaagctttaccataaacagcgtcatgctgagaaaatacaaatgaaaaagactatcaagatgcatgaaaagagaaacaccaaacaaaagaatgatgaaaagacaccacagggagcagtacctgcctatctgctggacagagagggacaatctcgagctaaagtactttccaatatgattaaacagaaaagaaaagagaaggcgggaaaatgggaagtccctctgcctaaagtacgtgcccagggagaaacagaagtattaaaagttattcgaacaggaaagagaaagaagaaggcatggaagagaatggttactaaagtgtgctttgttggagatggctttacaagaaaaccacctaaatatgaaagattcatcaggccaatgggcttgcgtttcaagaaagcccatgtaacacatcctgaactgaaagccaccttttgcctaccaatacttggtgtaaagaagaatccctcatccccactgtatacaactttgggtgttattaccaaaggtactgtcattgaagtaaatgtgagcgaattgggccttgtgacgcaaggaggcaaagttatttggggaaaatatgcccaggttaccaacaatcctgaaaatgatggatgtataaatgcagtcttactggtttgacagcaatttcatatataattattgaggactacacaccaattgaagaaactgccattactgtgatgtttctgaatactaccaaacagccatacatgtctgcaatgaagagatttattaaattgtaaacattaaagtggtccagttttataaatggtctttattttgaaatacgctttgaccccatgttcataaaactgaatgattgaaaaaaagcaaatatacaaatatcctacttcat

SEQ ID NO: 172 - DNA, 1548 bp, Homo sapiens
gaaatggcccagcttggctctgccttctgcagtgtgagtaacacactgaagccagaagctgtgggctgtggggaagtggctgcatcgccacccaagggaccctggactttgccagacgtcagggttgagaggagccactagcaccatcccagagctgtcagcaccggcctcagcccaggcggctctctccctgagcttcctgtaccctgaccctctccagcctcagacctgagacagggctggacaaggaagcagagagcagaagaaaagcagaagcgaagctcagatctgctgggaggagactacattttgtcccctcctggggtcttgcacagtggcaggtgacattcgtgttacaggaatgactgccagggcctgggcctcgtggcggtcttcagctctgctcctcctgcttgtcccaggctattttcctctgagccaccccatgaccgtggcgggccccgtggggggatccctgagtgtgcagtgtcgctatgagaaggaacacaggaccctcaacaaattctggtgcagaccaccacagattctccgatgtgacaagattgtggagaccaaagggtcagcagggaaaaggaatggccgagtgtccatcagggacagtcctgcaaacctcagcttcacagtgaccctggagaatctcacagaggaggacgcaggcacctactggtgtggggtggatacaccgtggctccgagactttcatgatcccattgtcgaggttgaggtgtccgtgttcccggccgggacgaccacagcctccagcccccagagctccatgggcacctcaggtcctcccacgaagctgcccgtgcacacctggcccagcgtgaccagaaaggacagccccgaacccagcccacaccctggctccctgttcagcaatgtccgcttcctgctcctggtcctcttggagctgcccctgctcctgagcatgctgggtgccgtcctctgggtgaacagacctcagagaagctctagaagcaggcagaattggcccaagggtgagaaccagtagcatctgctgtccatcaaggccctgtgctgcaacagagcccctctgggggactggaatgacctcctgaccactccctcccgggctgctctctccacatctcctggaatcctttgtgagcctccttcagccttttccctgtgcccgatcctcatgtgtcacatgtgaacctgacggacatggacgccctgagctgtgagtccacgtctcatgtgcacgccccggccagctaagcctcgggccgtcagcaatacctctgagtgcccggatgccctccctgcacccttccatttctccaggagcctggcactgcttcctccaccgttttcacagggagaagcaggtctaggactcccctgcacctttgccaccataatggcccacactccctgggtccaggagtgtagaatatgcggctgcttccatttgctgagtgtgtcgattcaatgatgctttcaaactttaataaatgacaatgtgtaggccaaaaaaaaaaaaaaaaaaaaaaaaaaaaa

SEQ ID NO: 173 - DNA, 2060 bp, Homo sapiens
ctattgatctggactcctggataggcagctggaccaacggacggatgccatgagggctctgctgctcctggggttcctgctggtgagcttggagtcaacactttcgattccaccttgggaagcccccaaggagcataagtacaaagctgaagagcacacagtcgttctcactgtcaccggggagccctgccacttccccttccagtaccaccggcagctgtaccacaaatgtacccacaagggccggccaggccctcagccctggtgtgctaccacccccaactttgatcaggaccagcgatggggatactgtttggagcccaagaaagtgaaagaccactgcagcaaacacagcccctgccagaaaggagggacctgtgtgaacatgccaagcggcccccactgtctctgtccacaacacctcactggaaaccactgccagaaagagaagtgctttgagcctcagcttctccggtttttccacaagaatgagatatggtatagaactgagcaagcagctgtggccagatgccagtgcaagggtcctgatgcccactgccagcggctggccagccaggcctgccgcaccaacccgtgcctccatgggggtcgctgcctagaggtggagggccaccgcctgtgccactgcccggtgggctacaccggagccttctgcgacgtggacaccaaggcaagctgctatgatggccgcgggctcagctaccgcggcctggccaggaccacgctctcgggtgcgccctgtcagccgtgggcctcggaggccacctaccggaacgtgactgccgagcaagcgcggaactggggactgggcggccacgccttctgccggaacccggacaacgacatccgcccgtggtgcttcgtgctgaaccgcgaccggctgagctgggagtactgcgacctggcacagtgccagaccccaacccaggcggcgcctccgaccccggtgtcccctaggcttcatgtcccactcatgcccgcgcagccggcaccgccgaagcctcagcccacgacccggaccccgcctcagtcccagaccccgggagccttgccggcgaagcgggagcagccgccttccctgaccaggaacggcccactgagctgcgggcagcggctccgcaagagtctgtcttcgatgacccgcgtcgttggcgggctggtggcgctacgcggggcgcacccctacatcgccgcgctgtactggggccacagtttctgcgccggcagcctcatcgccccctgctgggtgctgacggccgctcactgcctgcaggaccggcccgcacccgaggatctgacggtggtgctcggccaggaacgccgtaaccacagctgtgagccgtgccagacgttggccgtgcgctcctaccgcttgcacgaggccttctcgcccgtcagctaccagcacgacctggctctgttgcgccttcaggaggatgcggacggcagctgcgcgctcctgtcgccttacgttcagccggtgtgcctgccaagcggcgccgcgcgaccctccgagaccacgctctgccaggtggccggctggggccaccagttcgagggggcggaggaatatgccagcttcctgcaggaggcgcaggtaccgttcctctccctggagcgctgctcagccccggacgtgcacggatcctccatcctccccggcatgctctgcgcagggttcctcgagggcggcaccgatgcgtgccagggtgattccggaggcccgctggtgtgtgaggaccaagctgcagagcgccggctcaccctgcaaggcatcatcagctggggatcgggctgtggtgaccgcaacaagccaggcgtctacaccgatgtggcctactacctggcctggatccgggagcacaccgtttcctgattgctcagggactcatctttccctccttggtgattccgcagtgagagagtggctggggcatggaaggcaagattgtgtcccattcccccagtgcggccagctccgcgccaggatggcgcaggaactcaataaagtgctttgaaaatgctgagaaaaaaaaaaa

SEQ ID NO: 174 - DNA, 1676 bp, Homo sapiens
aagtcataaggtgaaaaagcctatttcagagagcacttcctgaaagagacaaagcagcaattaaagtcagcccagcaccaactccgacgccaagcgttacactggaaactactttttaaagcaacaaaagagtctaaaacaaaatacaacatttcttaaatacactgtttccagaaagagctattttaacagaagcaactcaaagatatcccttcgacagaagtggaagtgctgaaaaatgctcatctctcacacagacttttgatggacaggaggtgctgctttctgtgaaccactgaagtagagcagctgaaatcacaaaacctggaagacttggctttacgtactcccaattgtgcactagaaaacagctcatctattgctctaacagtctagttcttgatctgctgaccatgacacaaaacattgctgtttctcaacctatgataatttaaagagaacataagtttctaagtatcatgcctaccaacaagctgtaaaatgatcaccctgaacaatcaagatcaacctgtcccttttaacagctcacatccagatgaatacaaaattgcagcccttgtcttctatagctgtatcttcataattggattatttgttaacatcactgcattatgggttttcagttgtaccaccaagaagagaaccacggtaaccatctatatgatgaatgtggcattagtggacttgatatttataatgactttaccctttcgaatgttttattatgcaaaagatgaatggccatttggagagtacttctgccagattcttggagctctcacagtgttttacccaagcattgctttatggcttcttgcctttattagtgctgacagatacatggccattgtacagccgaagtacgccaaagaacttaaaaacacgtgcaaagccgtgctggcgtgtgtgggagtctggataatgaccctgaccacgaccacccctctgctactgctctataaagacccagataaagactccactcccgccacctgcctcaagatttctgacatcatctatctaaaagctgtgaacgtgctgaacctcactcgactgacattttttttcttgattcctttgttcatcatgattgggtgctacttggtcattattcataatctccttcacggcaggacgtctaagctgaaacccaaagtcaaggagaagtccataaggatcatcatcacgctgctggtgcaggtgctcgtctgctttatgcccttccacatctgtttcgctttcctgatgctgggaacgggggagaacagttacaatccctggggagcctttaccaccttcctcatgaacctcagcacgtgtctggatgtgattctctactacatcgtttcaaaacaatttcaggctcgagtcattagtgtcatgctataccgtaattaccttcgaagcatgcgcagaaaaagtttccgatctggtagtctacggtcactaagcaatataaacagtgaaatgttatgaataataaggttctttcatttcaatcccatcaaaattcacttcactaactactctggcgtcaatggatattctgtataatactatcaagtcccttttctcttgaaaaaataaattcattatcttcattttaaaaacttatataaaacatttttgtgaattattcaaaaaaaaaaaaaaaa

SEQ ID NO: 175 - DNA, 2753 bp, Homo sapiens
gagcgaccgtcggggccggctggggccggagctcggggctcggtgggcctacagcggctccggacggacccccggggctggggagtcggggaggcctgccccggccccctgcccgcggccgccatggcggagaattggaagaactgcttcgaggaggagctcatctgccctatctgcctgcacgttttcgtggagccagtgcagctgccgtgcaaacacaacttctgccggggctgcatcggcgaggcgtgggccaaggacagcggcctcgtacgctgcccagagtgcaaccaggcctacaaccagaagccgggcctggagaagaacctgaagctcaccaacatcgtggagaagttcaatgccctgcacgtggagaagccgccggcggcgctgcactgcgtgttctgccgccgcggccccccgctgcccgcgcagaaggtctgcctgcgctgcgaggcgccctgctgccagtcccacgtgcagacgcacctgcagcagccctccaccgcccgcgggcacctcctggtggaggcggacgacgtgcgggcctggagctgcccgcagcacaacgcctaccgcctctaccactgcgaggccgagcaggtggccgtgtgccagtactgctgctactacagcggcgcgcatcagggacactcggtgtgcgacgtggagatccgaaggaatgaaatccggaagatgctcatgaagcagcaggaccggctggaggagcgagagcaggacattgaggaccagctgtacaaactcgagtcagacaagcgcctggtggaggagaaagtgaaccaactgaaggaggaagttcggctgcagtacgagaagctgcaccagctgctggacgaggacctgcggcagacagtggaggtcctagacaaggcccaggccaagttctgcagcgagaacgcagcgcaggcgctgcacctcggggagcgcatgcaggaggccaagaagctgctgggctccctgcagctgctctttgataagacggaggatgtcagcttcatgaagaacaccaagtctgtgaaaatcctgatggacaggacccagacctgcacgagcagcagcctttcccccactaagatcggccacctgaactccaagctcttcctgaacgaagtggccaagaaggagaagcagctgcggaaaatgctagaaggccccttcagcacgccggtgcccttcctgcagagtgtccccctgtacccttgcggcgtgagcagctctggggcggaaaagcgcaagcactcaacggccttcccagaggccagtttcctagagacgtcgtcgggccctgtgggcggccagtacggggcggcgggcacagccagcggtgagggccagtctgggcagcccctggggccctgcagctccacgcagcacttggtggccctgccgggcggcgcccaaccagtgcactcaagccccgtgttccccccatcgcagtatcccaatggctccgccgcccagcagcccatgctcccccagtatggcggccgcaagattctcgtctgttctgtggacaactgttactgttcttccgtggccaaccatggcggccaccagccctacccccgctccggccactttccctggacagtgccctcgcaggagtactcacacccgctcccgcccacaccctccgtcccccagtcccttcccagcctggcggtcagagactggcttgacgcctcccagcagcccggccaccaggatttctacagggtgtatgggcagccgtccaccaaacactacgtgacgagctaacgccacgcaggcggcggggcgctggggaatcttcctccccagcccccgggctcgggagttatgcatccagagacctgcccttctaccttcctcgcctcccctcttcctcattccattgccccaggtcttttccttttggattttgttttggttttggctttgtttttgatttttttttattatgaatctcctggacgcagaggtgacagtgggagctggcctgggccaggacggcaggtggccctggagatgggaaagtgtctgtgtcgaggcgctgagctctctctctgtttctccttttttcctctactccttccccttcacacccccgtggctggaaggaacctcggcttccctgaaagcttgggggtcccacccttcttaccccacccgggaggaacgcccagggccccgggcttgtttctcctcttgttttccttttgggcagtttgatcactgatcgagtaaggaatgacctttagattgtgcgacttttgtttttgtttttttaaatttttttaaaccaagaatgatttctcctgcttccttctcctcaccatcttcccagacggagttcaaaggccacttctcaagcagcttttggcaccttcagcctcagagtggaatcttttaaagacaggacccctatgtccaggaaaggggaaaaggaactttgccaatgatagtgaccacagcaaaagcaaataataataatattaataataataaagagaaataaaataataaaataaaaaacaatagcacagcccttgttgaggtcagcagggaggaggggctgcccggagttgggtccttgcctggattttgacacagcaacttcctgtagtgagcactttgtatgaatcgtggacttcctgttctcaaggcgcaggtatttattctgtatctgtctagagcacacaccaaaatccaaccttctaataaacatgatggcgcagtcccacaaaaaaaaa

SEQ ID NO: 176 - DNA, 3555 bp, Homo sapiens
tttcccttttttttccttttggcaacccacacccttccacacacgctcaccccaaaattaaacaccaagatcctctaacttgtttggattgactgatgaagacataaagctctatgttttttgaggtggagtgagtggtttttcttcatttttaaatggccaaatgacagcttgacccagtttgctttccaatcaaagggcatttattttgaatgtctctttgtggcgcaagagccaacgcaaaaatgatggcggcttacaatggcggtacatctgcagcagcagcaggtcaccaccaccaccatcaccaccaccttccacacctccctcctcctcacctgcaccaccaccaccaccctcaacaccatcttcatccggggtcggctgccgctgtacaccctgtacagcagcacacctcttcggcagctgcggcagccgcagcagcggctgcagctgcagccatgttaaaccctgggcaacaacagccatatttcccatcaccggcaccggggcaggctcctggaccagctgcagcagccccagctcaggtacaggctgccgcagctgctacagttaaggcgcaccatcatcagcactcgcatcatccacagcagcagctggatattgagccggatagacctattggatatggagcctttggtgttgtctggtcagtaacagatccaagagatggaaagagagtagcgctcaaaaagatgcccaacgtcttccagaatctggtctcttgcaaaagggtcttccgggaattgaagatgttgtgtttttttaagcatgataatgtactctctgcccttgacatactccaacctccacacattgactattttgaagaaatatatgttgtcacagaattgatgcagagtgacctacataaaattatcgtctctcctcaaccactcagctcagatcatgtcaaagtttttctttatcagattttgcgaggtttgaaatatctccattcagctggcattttacatcgagacattaagccagggaatctccttgtgaacagcaactgtgttctaaagatttgtgattttggattggccagagtggaagaattagatgaatcccgtcatatgactcaggaagttgttactcagtattatcgggctccagaaatcctgatgggcagccgtcattacagcaatgctattgacatctggtctgtgggatgtatctttgcagaactactaggacgaagaatattgtttcaggcacagagtcccattcagcagttggatttgatcacggatctgttgggcacaccatcactggaagcaatgaggacagcttgtgaaggcgctaaggcacatatactcaggggtcctcataaacagccatctcttcctgtactctataccctgtctagccaggctacacatgaagctgttcatctcctttgcaggatgttggtctttgatccatccaaaagaatatccgctaaggatgccttagcccacccctacctagatgaagggcgactacgatatcacacatgtatgtgtaaatgttgcttttccacctccactggaagagtttataccagtgactttgagcctgtcaccaatcccaaatttgatgacactttcgagaagaacctcagttctgtccgacaggttaaagaaattattcatcagttcattttggaacagcagaaaggaaacagagtgcctctctgcatcaaccctcagtctgctgcttttaagagctttattagttccactgttgctcagccatctgagatgcccccatctcctctggtgtgggagtgatggtggaagataatgtactactgaagatgtaatgtagctttccactggagtctgggatttgcaattctggaggttaatcatgcttgtactgtaattttactaatgaagttttaaattaacaaccactacttgtatgatatgaataatatttagaaatgttactagacttttaatcttgtaaagtggttgtgcttttagaagaaaaatattttacccagagttgcacatgttttatgaatttagtgcagctgttatggctcacctcagaacaaaagagaattgaaccaaatttgggagtttggggttttatgttttgtttttcttttctaaaatgaagtgagattgttcacacacacacacacacacacacacacacacaaacacaaaggacagtcatacattttgatatttgagccattcctaaagatttggggttttctaaaactaaagaatctaggaaccttgcctgcgaccaatcatggagccacgtgagctgatcgtggctgcacctggggggagggtagggaggaggggcatgccacctaatgatcaagccctataattagcttctcattagagccgtgatggtgatgtgtgctgtctaaaatccaatgttgtgggtagagagaatgagtttgtgactaggagagactaaacttttgttttccttacccagtataaatatatatatatatatttaatctatttttattagaagtttttctgctctttcttacataaaagaaccccaagcatgcatctttcatgtgtgtaaataattcatttctgggctaatttcaaaagaatcccaatattgctgtatagaaagagaactagcttgcacattttaggtctgtgaaattttgtgagacttttcctgcactggacagtaaaaaaataataaaagacaaaaacaaatttaaaaaaaaatttaagccacaaaaaaaggcacatagggaattatgtcaaatgtgtttgtgtccttaggcaaagctgtgggagtcttgaaatgtcacagtagtaaataacttattactttttgacaagttctttttttctgttggaacactgaattcttctgtgcatatgtacatatgaatacaaatcgaaggcctctacctcctggagttatacaacttggcttgtttacctccacatgctgatgatgactattttttttttttgagttcagtgtggagacttgaaacttgaatgtcccttccaacttttatattaaaaataaaaagacaagaaaattgaagatcatttttcacctgtacaaggaatactaatggatcgtcttaaaattggtctaggaaaaaaccttggtgtgtgttatggacaattaactgttaaagttattgtaagttatctgtatttagcagagtattttcaacttgagtgatctgagctgaatttgaagactattaataagttatgtttggaagttttaacttcaatgaagtaattatttgctgtgaaagaaacaaacattgaattactaaacaaagatggtgcaatatctttgttttttttttatgaggctcctgagaatcaacccaactgaagcatttcaattcacttgaatgagaaacgtgtttagtatcaaaagagcccaagaagacactggtgtgaaaggtacaatctcagaggttggtcaattaccgtggcacactttctggtcactttgtacaatgtagatttgaagtacagtggtgaaaacattaaatgtgacatttgaaaaaaaaaaaaaaaaaaa

SEQ ID NO: 177 - DNA, 6462 bp, Homo sapiens
ggtcccgccccttcctaccttccagtagccggcggcggtgtctcaggcggcaatggaaggatccgagcctgtggccgcccatcagggggaagaggcgtcctgttcttcctgggggactggcagcacaaataaaaatttgcccattatgtcaacagcatctgtggaaatcgatgatgcattgtatagtcgacagaggtacgttcttggagacacagcaatgcagaagatggccaagtcccatgttttcttaagtgggatgggtggtcttggtttggaaattgcaaagaatcttgttcttgcagggattaaggcagttacaattcatgatacagaaaaatgccaagcatgggatctaggaaccaacttctttctcagtgaagatgatgttgttaataagagaaacagggctgaagctgtacttaaacatattgcagaactaaatccatacgttcatgtcacatcatcttctgttcctttcaatgagaccacagatctctcctttttagataaataccagtgtgtagtattgactgagatgaaacttccattgcagaagaagatcaatgacttttgccgttctcagtgccctccaattaagtttatcagtgcagatgtacatggaatttggtcaaggttattttgtgatttcggtgatgaatttgaagttttagatacaacaggagaagaaccaaaagaaattttcatttcaaacataacgcaagcaaatcctggcattgttacttgccttgaaaatcatcctcacaaactggagacaggacaattcctaacatttcgagaaattaatggaatgacaggtttaaatggatctatacaacaaataacggtgatatcgccattttcttttagtattggtgacaccacagaactggaaccatatttacatggaggcatagctgtccaagttaagactcctaaaacagttttttttgaatcactggagaggcagttaaaacatccaaagtgccttattgtggattttagcaaccctgaggcacctttagagattcacacagctatgcttgccttggaccagtttcaggagaaatacagtcgcaagccaaatgttggatgccaacaagattcagaagaactgttgaaactagcaacatctataagtgaaaccttggaagagaagcctgatgtaaatgctgacattgtgcattggctctcttggactgcccaaggctttttatctccacttgctgcagcagtaggaggtgttgccagccaagaagtattgaaagctgtaacaggaaaattttctcctttgtgccagtggttatatcttgaagcagcagatattgttgaatcactaggcaaacctgaatgtgaagaatttctcccacgaggagatagatatgatgccttaagagcttgcattggagacactttgtgtcagaaactgcaaaatttaaacatcttcttagtagggtgtggagccataggctgtgaaatgttgaaaaattttgctttacttggtgttggcacaagcaaagagaaaggaatgattacagttacagatcctgacttgatagagaaatccaacttaaatagacagttcctatttcgtcctcatcacatacagaaacctaaaagctacactgctgctgatgctactctgaaaataaattctcaaataaagatagatgcacacctgaacaaagtatgtccaaccactgagaccatttacaatgatgagttctatactaaacaagatgtaattattacagcattagataatgtggaagccaggagatacgtagacagtcgttgcttagcaaatctaaggcctcttttagattctggaacaatgggcactaagggacacactgaagttattgtaccgcatttgactgagtcttacaatagtcatcgggatcccccagaagaggaaataccattttgtactctaaaatcctttccagctgctattgaacataccatacagtgggcaagagataagtttgaaagttccttttcccacaaaccttcattgtttaacaaattttggcaaacctattcatctgcagaagaagtcttacagaagatacagagtggacacagtttagaaggctgttttcaagttataaagttacttagcagaagacctagaaattggtcccagtgtgtagaattagcaagattaaagtttgaaaaatattttaaccataaggctcttcagcttcttcactgtttccctctggacatacgattaaaagatggcagtttattttggcagtcaccaaagaggccaccctctccaataaaatttgatttaaatgagcctttgcacctcagtttccttcagaatgctgcaaaactatatgctacagtatattgtattccatttgcagaagaggacttatcagcagatgccctcttgaatattctttcagaagtaaagattcaggaattcaagccttccaataaggttgttcaaacagatgaaactgcaaggaaaccagaccatgttcctattagcagtgaagatgagaggaatgcaattttccaactagaaaaggctattttatctaatgaagccaccaaaagtgaccttcagatggcagtgctttcatttgaaaaagatgatgatcataatggacacatagatttcatcacagctgcatcaaatcttcgtgccaaaatgtacagcattgaaccagctgaccgtttcaaaacaaagcgcatagctggtaaaattatacctgctatagcaacaaccactgctacagtttctggcttggttgccttggagatgatcaaagtaactggtggctatccatttgaagcttacaaaaattgttttcttaacttagccattccaattgtagtatttacagagacaactgaagtaaggaaaactaaaatcagaaatggaatatcatttacaatttgggatcgatggaccgtacatggaaaagaagatttcaccctcttggatttcataaatgcagtcaaagagaagtatggaattgagccaacaatggtggtacagggagtcaaaatgctttatgttcctgtaatgcctggtcatgcaaaaagattgaagttaacaatgcataaacttgtaaaacctactactgaaaagaaatatgtggatcttactgtgtcatttgctccagacattgatggagatgaagatttgccgggacctccagtaagatactacttcagtcatgacactgattaatacaagttgtcttaacgttactccaggaccacttgattttggaaagagtgcacttaattcagaagctaaagaaaatcagttcataatactatggatttctctttcattaagccttaattttaagggaaacatcagtaagaaactgcactgaagaattataaaacattttggggcatagcatacacttgtctaacggttcacacgtggctatgatcacaagcaactttgaactggaatgctatttacaaaagttttgtgtattaatctgtgtattaatctctctggataaaaagaaggaaaaaatatgtatgaccagaacagatatggatgaagaaattgaaagcaacgaatgcaactattcaaaaagtttaattttatgaatttcttttttgtttagtcttgaagactgattttctatgcaaatagtgtttggcatcctgcacctctgatatgatttggctttgagaatttaataccactgggaagaagtatggtagtggtggatgaagggtggatattttaaattgtgcagttacagtttactgtcctattacctctgctcgtttaaccagtttgttatatcactgtgtccccaaaatcaggatttttgttgatagcatcagtgttgtaggagcaataggtcagatgagacatattaacttagactaaacgtgaacagtattatatggactctcacaacgctcttagagaatccgtgaatgtgaacagacaaatgtggctaaccatttgattcttcagtatgccttctaatgtggctattttatttatgtgagactctaaacctgattgtcctaatatataaaactaaaagattttgtaaagggagtgtctttagaaatagatgaaatgtagaatgttaaaaattattgctagggtagtcttttttttttccagaaacctaattagggtattaaattttgtgttttttttgttttttttttttaaacagaagcatgttatttcattcccattcccagaaagggagttaatgaagataaaaatttattttttaaggtctttattgagagaaactttgttttctgatatgaactattgcagatgtttttataaatactttcattaaaatgatgtaaacagtagtacccaacactgtaaactcagtgaaaatagtaaatgattcttttattactaagactgtcatgcattctgaagcagttggcttttttttaaccataggaagtaatttccctctagctcctttccttctactctcctgctcagaccattagtaggtactttgttaaataaaaaactagattaacatcaatattactccaatttggtatcttttacactatgtattatacctactttctttttatttcatttacaaatagtttaaattactttatcaaccagctgtattgtttccctcttgtaaaagtaccatcaagtggggaaaatgtatgtggaagtggagagtgaatttgtatgactaaaggataatctgtacatggggaagtgggcaaaagtggataggatgaatttaaagaaaatgactacctttggaaaaaagaaattaaattttgttcacatatcctaccctttcccattgtgcatatcccaagtgtcatatttaaaactaaggttacttaaaacagaatccaggaatatcaaggctctgtggcttggaattttagaggataggactaataaaaggacttttgcaaagaaggcttttttccacgttcactttgttttgtgttctttgaaagtaactgatacttttcgggtagttaattcagcagtccataaatatgatccagtaacttgcttatattttattgaagtctcgacagctcttcagaagtaaatttagaacgatgctgtcagttcatatttatagatattagtgttttagcagataaaacaaaatcaacaaaaattaagttcattttgtgattaaacctgcaaccatttttccattactttttttctatagttaatggttattgccatgatttcttctgtttggttctactaagctagaaagccagggtgaagttaatgataattcccattattttatttctgtaccatgagattgctgttgatgactgaaataccaggtgcaaaaattaatgatttgatttttgtacagtttcaatgagtattttttacttattaaaaataaattaagaaatgtaagaatatctttgtaaatcatgtttcataagttgactccagagattctgattttgctgtttattttgtgagtaatgttgctttggtgtttcctgattttcaagtttgcaatcatggagatacagcagttattaggtgtggaaggacattacctcaaatgtcctcagatggctccaggaaattcttttaaaacagttggagagaaatagtcgtgaccatgtaaaacctagaggatctggtaaatcccatactactggttagggatttgtaaagtccatttctttttagagttcaaagcagttctgttacttgtccataagttcctcataaattgtcccaaaggtaggacatggaaataaatgtatatctttattttttaatctactatgtcacactctggtgatattcatggaacattaaaaaagcaactatgtttattttataattagtaaaatgaagatagaaaattgttcttttgaaatttttagggaaaaaaaaaatctcgtgacctaaatctttccactataatgaatattcattgtgattgcaaatatctaattttatataatcactgtgtatggatttagcgattttacttttcatagattcaaaaacatataatctgaatgctttctctgaaaaaaaaaaaatcagagttgagctcttgaggatcagagttaagtatccattgataatatgtgttcattttgctctatgtcataactttgtttttttattgagaaatatatatttttcaaaaacacatatatattcaaaaatacataaaatataaatatgcagttcaaggaataattttaaagcaactatataactagcactcagcttagtagaatatattgacagcagttcagaaattacacatgtagttccttcccagtcacaaccagctccctgccacgtaccctttggtaattaccactatcctaccttgtatgataattgtctctttgtttttatagtgttaccacctatgtgtgtaaacttaaacaatacagtttgcttgtttttgagttttatttaaaatcataaaaaaaaaaaaaaaa

SEQ ID NO: 178 - DNA, 1220 bp, Homo sapiens
cccccactggctgctctgaaaagccatctttgcattgttcctcatccgcctccttgctcgccgcagccgcctccgccgcgcgcctcctccgccgccgcggactccggcagctttatcgccagagtccctgaactctcgctttctttttaatcccctgcatcggatcaccggcgtgccccaccatgtcagacgcagccgtagacaccagctccgaaatcaccaccaaggacttaaaggagaagaaggaagttgtggaagaggcagaaaatggaagagacgcccctgctaacgggaatgctaatgaggaaaatggggagcaggaggctgacaatgaggtagacgaagaagaggaagaaggtggggaggaagaggaggaggaagaagaaggtgatggtgaggaagaggatggagatgaagatgaggaagctgagtcagctacgggcaagcgggcagctgaagatgatgaggatgacgatgtcgataccaagaagcagaagaccgacgaggatgactagacagcaaaaaaggaaaagttaaactaaaaaaaaaaaggccgccgtgacctattcaccctccacttcccgtctcagaatctaaacgtggtcaccttcgagtagagaggcccgcccgcccaccgtgggcagtgccacccgcagatgacacgcgctctccaccacccaacccaaaccatgagaatttgcaacaggggaggaaaaaagaaccaaaacttccaaggccctgctttttttcttaaaagtactttaaaaaggaaatttgtttgtattttttatttacattttatatttttgtacatattgttagggtcagccatttttaatgatctcggatgaccaaaccagccttcggagcgttctctgtcctacttctgactttacttgtggtgtgaccatgttcattataatctcaaaggagaaaaaaaaccttgtaaaaaaagcaaaaatgacaacagaaaaacaatcttattccgagcattccagtaacttttttgtgtatgtacttagctgtactataagtagttggtttgtatgagatggttaaaaaggccaaagataaaaggtttctttttttttccttttttgtctatgaagttgctgtttattttttttggcctgtttgatgtatgtgtgaaacaatgttgtccaacaataaacaggaattttattttgctgagttgttctaacaaaaaaaaaaaaaaaaaa

SEQ ID NO: 179 - DNA, 2952 bp, Homo sapiens
cggctggctgcggcggccggggaggccggggaggccgcggcgcggtcactgcgagccgagccgagccgcgccgagccgcgccgatcgccatccggcctcggcactcgcgcgcgatcccggccggcggcgcggcccggcgggccaggcggcgccacagcccatggagctcgagaacatcgtagcgaacacggtgctactcaaggcccgggaaggtggcggtggaaatcgcaaaggcaaaagcaagaaatggcggcagatgctccagttccctcacatcagccagtgcgaagagctgcggctcagcctcgagcgtgactatcacagcctgtgcgagcggcagcccattgggcgcctgctgttccgagagttctgtgccacgaggccggagctgagccgctgcgtcgccttcctggatggggtggccgagtatgaagtgaccccggatgacaagcggaaggcatgtgggcggcagctaacgcagaattttctgagccacacgggtcctgacctcatccctgaggtcccccggcagctggtgacgaactgcacccagcggctggagcagggtccctgcaaagaccttttccaggaactcacccggctgacccacgagtacctgagcgtggccccttttgccgactacctcgacagcatctacttcaaccgtttcctgcagtggaagtggctggaaaggcagccagtgaccaaaaacaccttcaggcaataccgagtcctgggcaaaggtggctttggggaggtgtgcgcctgccaggtgcgggccacaggtaagatgtatgcctgcaagaagctagagaaaaagcggatcaagaagcggaaaggggaggccatggcgctgaacgagaagcagatcctggagaaagtgaacagtaggtttgtagtgagcttggcctacgcctatgagaccaaggacgcgctgtgcctggtgctgacactgatgaacgggggcgacctcaagttccacatctaccacatgggccaggctggcttccccgaagcgcgggccgtcttctacgccgccgagatctgctgtggcctggaggacctgcaccgggagcgcatcgtgtacagggacctgaagcccgagaacatcttgctggatgaccacggccacatccgcatctctgacctgggactagctgtgcatgtgcccgagggccagaccatcaaagggcgtgtgggcaccgtgggttacatggctccggaggtggtgaagaatgaacggtacacgttcagccctgactggtgggcgctcggctgcctcctgtacgagatgatcgcaggccagtcgcccttccagcagaggaagaagaagatcaagcgggaggaggtggagcggctggtgaaggaggtccccgaggagtattccgagcgcttttccccgcaggcccgctcactttgctcacagctcctctgcaaggaccctgccgaacgcctggggtgtcgtgggggcagtgcccgcgaggtgaaggagcaccccctctttaagaagctgaacttcaagcggctgggagctggcatgctggagccgccgttcaagcctgacccccaggccatttactgcaaggatgttctggacattgaacagttctctacggtcaagggcgtggagctggagcctaccgaccaggacttctaccagaagtttgccacaggcagtgtgcccatcccctggcagaacgagatggtggagaccgagtgcttccaagagctgaatgtctttgggctggatggctcagttcccccagacctggactggaagggccagccacctgcacctcctaaaaagggactgctgcagagactcttcagtcgccaaaggattgctgtggaaactgcagcgacagcgaggaagagctccccacccgcctctagcccccagcccgaggcccccaccagcagttggcggtagcagctactccgagcgccgtttacagttttgcacagtgatcttccccattgtccactcaagtcgtggcctggggaacacagacggagctgtccccagtgtcctccgtccctcagcccctggcctggctgagtttggcagggcctgggccatccctgggacaaaggtgcgtcccttcagctcttctccgtggagctcggggctttctgtatttatgtatttgtacgaatgtatatagcgaccagagcattcttaattcccgccgcagacctggcgcccccgccttggctcctgggggcagccagccctggctgggagagcgggagctggcagaggagccactgccaaactcaaggctcctctggcccagcttggatggctgagggtggtcacacccctgagccttcagcactgtgctggccaccccggcctctgagtaagactcgtgcctccccctgctgccctgggctcaggctgctaccctctggggcccaaagctgtcccttctcagtgcttgtcagcgctgggtctggggcctctgtatgccctaggcctgtgccaaagtggccagagattgggctgcctgtgatacccatcagcccactgccccggccggcccagataggtctgcctctgccttccagctcccacagcctggtccctgatactgggctctgtcctgcagacacctctttcagaaacgcccaagcccagcccctaggagggggtggggcatccctggtcaaccctcaaacattccggactcccctcataacaatagacacatgtgcccagcaataatccgccccttcctgtgtgcgcctgtggggtgcgtgcgcgcgcgtgtgtacctgtgtgggtgaaggggatagggcgaggctgtgcctgtgccccaggtcccagccctggcccttcccagactgtgatggccatcctggtcccagtgttagggtagcatgggattacagggccctgttttttccatatttaaagccaatttttattactcgttttgtccaacgtaa

SEQ ID NO: 180 - DNA, 6774 bp, Homo sapiens
cggccccagaaaacccgagcgagtagggggcggcgcgcaggagggaggagaactgggggcgcgggaggctggtgggtgtggggggtggagatgtagaagatgtgacgccgcggcccggcgggtgccagattagcggacgcggtgcccgcggttgcaacgggatcccgggcgctgcagcttgggaggcggctctccccaggcggcgtccgcggagacacccatccgtgaaccccaggtcccgggccgccggctcgccgcgcaccaggggccggcggacagaagagcggccgagcggctcgaggctgggggaccgcgggcgcggccgcgcgctgccgggcgggaggctggggggccggggccggggccgtgccccggagcgggtcggaggccggggccggggccgggggacggcggctccccgcgcggctccagcggctcggggatcccggccgggccccgcagggaccatggcagccgggagcatcaccacgctgcccgccttgcccgaggatggcggcagcggcgccttcccgcccggccacttcaaggaccccaagcggctgtactgcaaaaacgggggcttcttcctgcgcatccaccccgacggccgagttgacggggtccgggagaagagcgaccctcacatcaagctacaacttcaagcagaagagagaggagttgtgtctatcaaaggagtgtgtgctaaccgttacctggctatgaaggaagatggaagattactggcttctaaatgtgttacggatgagtgtttcttttttgaacgattggaatctaataactacaatacttaccggtcaaggaaatacaccagttggtatgtggcactgaaacgaactgggcagtataaacttggatccaaaacaggacctgggcagaaagctatactttttcttccaatgtctgctaagagctgattttaatggccacatctaatctcatttcacatgaaagaagaagtatattttagaaatttgttaatgagagtaaaagaaaataaatgtgtatagctcagtttggataattggtcaaacaattttttatccagtagtaaaatatgtaaccattgtcccagtaaagaaaaataacaaaagttgtaaaatgtatattctcccttttatattgcatctgctgttacccagtgaagcttacctagagcaatgatctttttcacgcatttgctttattcgaaaagaggcttttaaaatgtgcatgtttagaaacaaaatttcttcatggaaatcatatacattagaaaatcacagtcagatgtttaatcaatccaaaatgtccactatttcttatgtcattcgttagtctacatgtttctaaacatataaatgtgaatttaatcaattcctttcatagttttataattctctggcagttccttatgatagagtttataaaacagtcctgtgtaaactgctggaagttcttccacagtcaggtcaattttgtcaaacccttctctgtacccatacagcagcagcctagcaactctgctggtgatgggagttgtattttcagtcttcgccaggtcattgagatccatccactcacatcttaagcattcttcctggcaaaaatttatggtgaatgaatatggctttaggcggcagatgatatacatatctgacttcccaaaagctccaggatttgtgtgctgttgccgaatactcaggacggacctgaattctgattttataccagtctcttcaaaaacttctcgaaccgctgtgtctcctacgtaaaaaaagagatgtacaaatcaataataattacacttttagaaactgtatcatcaaagattttcagttaaagtagcattatgtaaaggctcaaaacattaccctaacaaagtaaagttttcaatacaaattctttgccttgtggatatcaagaaatcccaaaatattttcttaccactgtaaattcaagaagcttttgaaatgctgaatatttctttggctgctacttggaggcttatctacctgtacatttttggggtcagctctttttaacttcttgctgctctttttcccaaaaggtaaaaatatagattgaaaagttaaaacattttgcatggctgcagttcctttgtttcttgagataagattccaaagaacttagattcatttcttcaacaccgaaatgctggaggtgtttgatcagttttcaagaaacttggaatataaataattttataattcaacaaaggttttcacattttataaggttgatttttcaattaaatgcaaatttgtgtggcaggatttttattgccattaacatatttttgtggctgctttttctacacatccagatggtccctctaactgggctttctctaattttgtgatgttctgtcattgtctcccaaagtatttaggagaagccctttaaaaagctgccttcctctaccactttgctggaaagcttcacaattgtcacagacaaagatttttgttccaatactcgttttgcctctatttttcttgtttgtcaaatagtaaatgatatttgcccttgcagtaattctactggtgaaaaacatgcaaagaagaggaagtcacagaaacatgtctcaattcccatgtgctgtgactgtagactgtcttaccatagactgtcttacccatcccctggatatgctcttgttttttccctctaatagctatggaaagatgcatagaaagagtataatgttttaaaacataaggcattcgtctgccatttttcaattacatgctgacttcccttacaattgagatttgcccataggttaaacatggttagaaacaactgaaagcataaaagaaaaatctaggccgggtgcagtggctcatgcctatattccctgcactttgggaggccaaagcaggaggatcgcttgagcccaggagttcaagaccaacctggtgaaaccccgtctctacaaaaaaacacaaaaaatagccaggcatggtggcgtgtacatgtggtctcagatacttgggaggctgaggtgggagggttgatcacttgaggctgagaggtcaaggttgcagtgagccataatcgtgccactgcagtccagcctaggcaacagagtgagactttgtctcaaaaaaagagaaattttccttaataagaaaagtaatttttactctgatgtgcaatacatttgttattaaatttattatttaagatggtagcactagtcttaaattgtataaaatatcccctaacatgtttaaatgtccatttttattcattatgctttgaaaaataattatggggaaatacatgtttgttattaaatttattattaaagatagtagcactagtcttaaatttgatataacatctcctaacttgtttaaatgtccatttttattctttatgtttgaaaataaattatggggatcctatttagctcttagtaccactaatcaaaagttcggcatgtagctcatgatctatgctgtttctatgtcgtggaagcaccggatgggggtagtgagcaaatctgccctgctcagcagtcaccatagcagctgactgaaaatcagcactgcctgagtagttttgatcagtttaacttgaatcactaactgactgaaaattgaatgggcaaataagtgcttttgtctccagagtatgcgggagacccttccacctcaagatggatatttcttccccaaggatttcaagatgaattgaaatttttaatcaagatagtgtgctttattctgttgtattttttattattttaatatactgtaagccaaactgaaataacatttgctgttttataggtttgaagaacataggaaaaactaagaggttttgtttttatttttgctgatgaagagatatgtttaaatatgttgtattgttttgtttagttacaggacaataatgaaatggagtttatatttgttatttctattttgttatatttaataatagaattagattgaaataaaatataatgggaaataatctgcagaatgtgggttttcctggtgtttccctctgactctagtgcactgatgatctctgataaggctcagctgctttatagttctctggctaatgcagcagatactcttcctgccagtggtaatacgattttttaagaaggcagtttgtcaattttaatcttgtggatacctttatactcttagggtattattttatacaaaagccttgaggattgcattctattttctatatgaccctcttgatatttaaaaaacactatggataacaattcttcatttacctagtattatgaaagaatgaaggagttcaaacaaatgtgtttcccagttaactagggtttactgtttgagccaatataaatgtttaactgtttgtgatggcagtattcctaaagtacattgcatgttttcctaaatacagagtttaaataatttcagtaattcttagatgattcagcttcatcattaagaatatcttttgttttatgttgagttagaaatgccttcatatagacatagtctttcagacctctactgtcagttttcatttctagctgctttcagggttttatgaattttcaggcaaagctttaatttatactaagcttaggaagtatggctaatgccaacggcagtttttttcttcttaattccacatgactgaggcatatatgatctctgggtaggtgagttgttgtgacaaccacaagcactttttttttttttaaagaaaaaaaggtagtgaatttttaatcatctggactttaagaaggattctggagtatacttaggcctgaaattatatatatttggcttggaaatgtgtttttcttcaattacatctacaagtaagtacagctgaaattcagaggacccataagagttcacatgaaaaaaatcaatttatttgaaaaggcaagatgcaggagagaggaagccttgcaaacctgcagactgctttttgcccaatatagattgggtaaggctgcaaaacataagcttaattagctcacatgctctgctctcacgtggcaccagtggatagtgtgagagaattaggctgtagaacaaatggccttctctttcagcattcacaccactacaaaatcatcttttatatcaacagaagaataagcataaactaagcaaaaggtcaataagtacctgaaaccaagattggctagagatatatcttaatgcaatccattttctgatggattgttacgagttggctatataatgtatgtatggtattttgatttgtgtaaaagttttaaaaatcaagctttaagtacatggacatttttaaataaaatatttaaagacaatttagaaaattgccttaatatcattgttggctaaatagaataggggacatgcatattaaggaaaaggtcatggagaaataatattggtatcaaacaaatacattgatttgtcatgatacacattgaatttgatccaatagtttaaggaataggtaggaaaatttggtttctatttttcgatttcctgtaaatcagtgacataaataattcttagcttattttatatttccttgtcttaaatactgagctcagtaagttgtgttaggggattatttctcagttgagactttcttatatgacattttactatgttttgacttcctgactattaaaaataaatagtagatacaattttcataaagtgaagaattatataatcactgctttataactgactttattatatttatttcaaagttcatttaaaggctactattcatcctctgtgatggaatggtcaggaatttgttttctcatagtttaattccaacaacaatattagtcgtatccaaaataacctttaatgctaaactttactgatgtatatccaaagcttctcattttcagacagattaatccagaagcagtcataaacagaagaataggtggtatgttcctaatgatattatttctactaatggaataaactgtaatattagaaattatgctgctaattatatcagctctgaggtaatttctgaaatgttcagactcagtcggaacaaattggaaaatttaaatttttattcttagctataaagcaagaaagtaaacacattaatttcctcaacatttttaagccaattaaaaatataaaagatacacaccaatatcttcttcaggctctgacaggcctcctggaaacttccacatatttttcaactgcagtataaagtcagaaaataaagttaacataactttcactaacacacacatatgtagatttcacaaaatccacctataattggtcaaagtggttgagaatatattttttagtaattgcatgcaaaatttttctagcttccatcctttctccctcgtttcttctttttttgggggagctggtaactgatgaaatcttttcccaccttttctcttcaggaaatataagtggttttgtttggttaacgtgatacattctgtatgaatgaaacattggagggaaacatctactgaatttctgtaatttaaaatattttgctgctagttaactatgaacagatagaagaatcttacagatgctgctataaataagtagaaaatataaatttcatcactaaaatatgctattttaaaatctatttcctatattgtatttctaatcagatgtattactcttattatttctattgtatgtgttaatgattttatgtaaaaatgtaattgcttttcatgagtagtatgaataaaattgattagtttgtgttttcttgtctccc

SEQ ID NO: 181 - DNA, 5940 bp, Homo sapiens
agctgcagcaaaatgaaagcaacaggagctgctccggggactgcttttgccagtacccagaatcagtgctcaggctcagaaatcctggatagaaagagcattttataaaagagaatgtgtccacatcatacccagcaccaaagacccccataggtgttgctgtgggcgtctgataggccagcatgttggcctcacccccagtatctccgtgcttcagaatgagaaaaatgaaagtcgcctctcccgaaatgacatccagtctgaaaagtggtccatcagcaaacacactcaactcagccctacggatgcttttgggaccattgagttccaaggaggtggccattccaacaaagccatgtatgtgcgagtatcttttgatacaaaacctgatctcctcttacacctgatgaccaaggaatggcagttggagcttcccaagcttctcatctctgtccatgggggcctgcagaactttgaactccagccaaaactcaagcaagtctttgggaaagggctcatcaaagcagcaatgacaactggagcgtggatattcactggaggggttaacacaggtgttattcgtcatgttggcgatgccttgaaggatcatgcctctaagtctcgaggaaagatatgcaccataggtattgccccctggggaattgtggaaaaccaggaggacctcattggaagagatgttgtccggccataccagaccatgtccaatcccatgagcaagctcactgttctcaacagcatgcattcccacttcattctggctgacaacgggaccactggaaaatatggagcagaggtgaaacttcgaagacaactggaaaagcatatttcactccagaagataaacacaagaatcggtcaaggtgttcctgtggtggcactcatagtggaaggaggacccaatgtgatctcgattgttttggagtaccttcgagacacccctcccgtgccagtggttgtctgtgatgggagtggacgggcatcggacatcctggcctttgggcataaatactcagaagaaggcggactgataaatgaatctttgagggaccagctgttggtgactatacagaagactttcacatacactcgaacccaagctcagcatctgttcatcatcctcatggagtgcatgaagaagaaggaattgattacggtatttcggatgggatcagaaggacaccaggacattgatttggctatcctgacagctttactcaaaggagccaatgcctcggccccagaccaactgagcttagctttagcctggaacagagtcgacatcgctcgcagccagatctttatttacgggcaacagtggccggtgggatctctggagcaagccatgttggatgccttagttctggacagagtggattttgtgaaattactcatagagaatggagtaagcatgcaccgttttctcaccatctccagactagaggaattgtacaatacgagacatgggccctcaaatacattgtaccacttggtcagggatgtcaaaaaggggaacctgcccccagactacagaatcagcctgattgacatcggcctggtgatcgagtacctgatgggcggggcttatcgctgcaactacacgcgcaagcgcttccggaccctctaccacaacctcttcggccccaagaggcccaaagccttgaaactgctgggaatggaggatgatattcccttgaggcgaggaagaaagacaaccaagaaacgtgaagaagaggtggacattgacttggatgatcctgagatcaaccacttccccttccctttccatgagctcatggtgtgggctgttctcatgaagcggcagaagatggccctgttcttctggcagcacggtgaggaggccatggccaaggccctggtggcctgcaagctctgcaaagccatggctcatgaggcctctgagaacgacatggttgacgacatttcccaggagctgaatcacaattccagagactttggccagctggctgtggagctcctggaccagtcctacaagcaggacgaacagctggccatgaaactgctgacgtatgagctgaagaactggagcaacgccacgtgcctgcagcttgccgtggctgccaaacaccgcgacttcatcgcgcacacgtgcagccagatgctgctcaccgacatgtggatgggccggctccgcatgcgcaagaactcaggcctcaaggtaattctgggaattctacttcctccttcaattctcagcttggagttcaagaacaaagacgacatgccctatatgtctcaggcccaggaaatccacctccaagagaaggaggcagaagaaccagagaagcccacaaaggaaaaagaggaagaggacatggagctcacagcaatgttgggacgaaacaacggggagtcctccaggaagaaggatgaagaggaagttcagagcaagcaccggttaatccccctcggcagaaaaatctatgaattctacaatgcacccatcgtgaagttctggttctacacactggcgtatatcggatacctgatgctcttcaactatatcgtgttagtgaagatggaacgctggccgtccacccaggaatggatcgtaatctcctatattttcaccctgggaatagaaaagatgagagagattctgatgtcagagccagggaagttgctacagaaagtgaaggtatggctgcaggagtactggaatgtcacggacctcatcgccatccttctgttttctgtcggaatgatccttcgtctccaagaccagcccttcaggagtgacgggagggtcatctactgcgtgaacatcatttactggtatatccgtctcctagacatcttcggcgtgaacaagtatttgggcccgtatgtaatgatgattggaaaaatgatgatagacatgatgtactttgtcatcattatgctggtggttctgatgagctttggggtcgccaggcaagccatcctttttcccaatgaggagccatcatggaaactggccaagaacatcttctacatgccctattggatgatttatggggaagtgtttgcggaccagatagaccctccctgtggacagaatgagacccgagaggatggtaaaataatccagctgcctccctgcaagacaggagcttggatcgtgccggccatcatggcctgctacctcttagtggcaaacatcttgctggtcaacctcctcattgctgtctttaacaatacattttttgaagtaaaatcgatatccaaccaagtctggaagtttcagaggtatcagctcatcatgactttccatgaaaggccagttctgcccccaccactgatcatcttcagccacatgaccatgatattccagcacctgtgctgccgatggaggaaacacgagagcgacccggatgaaagggactacggcctgaaactcttcataaccgatgatgagctcaagaaagtacatgactttgaagagcaatgcatagaagaatacttcagagaaaaggatgatcggttcaactcatctaatgatgagaggatacgggtgacttcagaaagggtggagaacatgtctatgcggctggaggaagtcaacgagagagagcactccatgaaggcttcactccagaccgtggacatccggctggcgcagctggaagaccttatcgggcgcatggccacggccctggagcgcctgacaggtctggagcgggccgagtccaacaaaatccgctcgaggacctcgtcagactgcacggacgccgcctacattgtccgtcagagcagcttcaacagccaggaagggaacaccttcaagctccaagagagtatagaccctgcaggtgaggagaccatgtccccaacttctccaaccttaatgccccgtatgcgaagccattctttctattcggtcaatatgaaagacaaaggtggtatagaaaagttggaaagtatttttaaagaaaggtccctgagcctacaccgggctactagttcccactctgtagcaaaagaacccaaagctcctgcagcccctgccaacaccttggccattgttcctgattccagaagaccatcatcgtgtatagacatctatgtctctgctatggatgagctccactgtgatatagaccctctggacaattccgtgaacatccttgggctgggcgagccaagcttttcaactccagtaccttccacagccccttcaagtagtgcctatgcaacacttgcacccacagacagacctccaagccggagcattgattttgaggacatcacctccatggacactagatctttttcttcagactacacccacctcccagaatgccaaaacccctgggactcagagcctccgatgtaccacaccattgagcgttccaaaagtagccgctacctagccaccacaccctttcttctagaagaggctcccattgtgaaatctcatagctttatgttttccccctcaaggagctattatgccaactttggggtgcctgtaaaaacagcagaatacacaagtattacagactgtattgacacaaggtgtgtcaatgcccctcaagcaattgcggacagagctgccttccctggaggtcttggagacaaagtggaggacttaacttgctgccatccagagcgagaagcagaactgagtcaccccagctctgacagtgaggagaatgaggccaaaggccgcagagccaccattgcaatatcctcccaggagggtgataactcagagagaaccctgtccaacaacatcactgttcccaagatagagcgcgccaacagctactcggcagaggagccaagtgcgccatatgcacacaccaggaagagcttctccatcagtgacaaactcgacaggcagcggaacacagcaagcctgcgaaatcccttccagagaagcaagtcctccaagccggagggccgaggggacagcctgtccatgaggagactgtccagaacatcggctttccaaagctttgaaagcaagcacaactaaaccttcttaatatccgccacagaaggctcaagaatccagccctaaaattctctccaactccagtttttcccctttccttgaatcatacctgctttattcttagctgagcaaaacaagcaatgctttgggaggtgttaactcaaaggtgacttctgggccacagatcaagaaagcatttgatctgacccagtgccagacacaggggatttaaggcatgttcacacttgctgggcagggagggggaagagagggagaaggaagggttagagatgaatgtgtatccgcagtcacagcagaaagccatgagagcaggggaaacaaggggcttcgagcacgctccatgccaggaggcatctgttgatttctgaccattatcaagagttgtaggatgcagggctaaattgcaaaataaaataaaatagccagcgtacacaatgagatattctaaacttccattctgttttcttttcacattggctccatcactggtgactgatgaagagcatcctctttattcagtataagccggcagcaagcagttctacctaacgtcccacatccttctcatgccaacacttctgtaattgatcattataaagaaaaaacaaggtaacagtcatagttcacctgtctcttatctattcacttctggtgccacaactgtttatccttttttgaagaaaataagggaacagaaatgcctttttgtattgcaatcgaaatgaaagaagagttgatgttaaaaaaacaaaagtcaagtgatttattatatacagtgggcgttcaagtctagtcgagcaagctcaggagaatgtaattaaataattttatattttttaatttattttgtatctcacctgtcatggatgaattcattcactgaatatgtaatattgaacttaaaaaaaaaaaaaaaaaaa

SEQ ID NO: 182 - DNA, 3814 bp, Homo sapiens
atttccggggacgccgcgccggactgaggctgtgcgcccgagactccgggtccccaggggctgcgccgggccggcctggcaagggggacgagtcagtggacactccaggaagagcggccccgcggggggcgatgaccgtgcgctgaccctgactcactccaggtccggaggcgggggcccccggggcgactcgggggcggaccgcggggcggagctgccgcccgtgagtccggccgagccacctgagcccgagccgcgggacaccgtcgctcctgctctccgaatgctgcgcaccgcgatgggcctgaggagctggctcgccgccccatggggcgcgctgccgcctcggccaccgctgctgctgctcctgctgctgctgctcctgctgcagccgccgcctccgacctgggcgctcagcccccggatcagcctgcctctgggctctgaagagcggccattcctcagattcgaagctgaacacatctccaactacacagcccttctgctgagcagggatggcaggaccctgtacgtgggtgctcgagaggccctctttgcactcagtagcaacctcagcttcctgccaggcggggagtaccaggagctgctttggggtgcagacgcagagaagaaacagcagtgcagcttcaagggcaaggacccacagcgcgactgtcaaaactacatcaagatcctcctgccgctcagcggcagtcacctgttcacctgtggcacagcagccttcagccccatgtgtacctacatcaacatggagaacttcaccctggcaagggacgagaaggggaatgtcctcctggaagatggcaagggccgttgtcccttcgacccgaatttcaagtccactgccctggtggttgatggcgagctctacactggaacagtcagcagcttccaagggaatgacccggccatctcgcggagccaaagccttcgccccaccaagaccgagagctccctcaactggctgcaagacccagcttttgtggcctcagcctacattcctgagagcctgggcagcttgcaaggcgatgatgacaagatctactttttcttcagcgagactggccaggaatttgagttctttgagaacaccattgtgtcccgcattgcccgcatctgcaagggcgatgagggtggagagcgggtgctacagcagcgctggacctccttcctcaaggcccagctgctgtgctcacggcccgacgatggcttccccttcaacgtgctgcaggatgtcttcacgctgagccccagcccccaggactggcgtgacacccttttctatggggtcttcacttcccagtggcacaggggaactacagaaggctctgccgtctgtgtcttcacaatgaaggatgtgcagagagtcttcagcggcctctacaaggaggtgaaccgtgagacacagcagtggtacaccgtgacccacccggtgcccacaccccggcctggagcgtgcatcaccaacagtgcccgggaaaggaagatcaactcatccctgcagctcccagaccgcgtgctgaacttcctcaaggaccacttcctgatggacgggcaggtccgaagccgcatgctgctgctgcagccccaggctcgctaccagcgcgtggctgtacaccgcgtccctggcctgcaccacacctacgatgtcctcttcctgggcactggtgacggccggctccacaaggcagtgagcgtgggcccccgggtgcacatcattgaggagctgcagatcttctcatcgggacagcccgtgcagaatctgctcctggacacccacagggggctgctgtatgcggcctcacactcgggcgtagtccaggtgcccatggccaactgcagcctgtacaggagctgtggggactgcctcctcgcccgggacccctactgtgcttggagcggctccagctgcaagcacgtcagcctctaccagcctcagctggccaccaggccgtggatccaggacatcgagggagccagcgccaaggacctttgcagcgcgtcttcggttgtgtccccgtcttttgtaccaacaggggagaagccatgtgagcaagtccagttccagcccaacacagtgaacactttggcctgcccgctcctctccaacctggcgacccgactctggctacgcaacggggcccccgtcaatgcctcggcctcctgccacgtgctacccactggggacctgctgctggtgggcacccaacagctgggggagttccagtgctggtcactagaggagggcttccagcagctggtagccagctactgcccagaggtggtggaggacggggtggcagaccaaacagatgagggtggcagtgtacccgtcattatcagcacatcgcgtgtgagtgcaccagctggtggcaaggccagctggggtgcagacaggtcctactggaaggagttcctggtgatgtgcacgctctttgtgctggccgtgctgctcccagttttattcttgctctaccggcaccggaacagcatgaaagtcttcctgaagcagggggaatgtgccagcgtgcaccccaagacctgccctgtggtgctgccccctgagacccgcccactcaacggcctagggccccctagcaccccgctcgatcaccgagggtaccagtccctgtcagacagccccccggggtcccgagtcttcactgagtcagagaagaggccactcagcatccaagacagcttcgtggaggtatccccagtgtgcccccggccccgggtccgccttggctcggagatccgtgactctgtggtgtgagagctgacttccagaggacgctgccctggcttcaggggctgtgaatgctcggagagggtcaactggacctcccctccgctctgctcttcgtggaacacgaccgtggtgcccggcccttgggagccttggggccagctggcctgctgctctccagtcaagtagcgaagctcctaccacccagacacccaaacagccgtggccccagaggtcctggccaaatatgggggcctgcctaggttggtggaacagtgctccttatgtaaactgagccctttgtttaaaaaacaattccaaatgtgaaactagaatgagagggaagagatagcatggcatgcagcacacacggctgctccagttcatggcctcccaggggtgctggggatgcatccaaagtggttgtctgagacagagttggaaaccctcaccaactggcctcttcaccttccacattatcccgctgccaccggctgccctgtctcactgcagattcaggaccagcttgggctgcgtgcgttctgccttgccagtcagccgaggatgtagttgttgctgccgtcgtcccaccacctcagggaccagagggctaggttggcactgcggccctcaccaggtcctgggctcggacccaactcctggacctttccagcctgtatcaggctgtggccacacgagaggacagcgcgagctcaggagagatttcgtgacaatgtacgcctttccctcagaattcagggaagagactgtcgcctgccttcctccgttgttgcgtgagaacccgtgtgccccttcccaccatatccaccctcgctccatctttgaactcaaacacgaggaactaactgcaccctggtcctctccccagtccccagttcaccctccatccctcaccttcctccactctaagggatatcaacactgcccagcacaggggccctgaatttatgtggtttttatacattttttaataagatgcactttatgtcattttttaataaagtctgaagaattactgtttaa

SEQ ID NO: 183 - DNA, 1229 bp, Homo sapiens
cttgcctgcttctctggcccctggtcctgtcctgttctccagcatggtgtgtctgaagctccctggaggctcctgcatgacagcgctgacagtgacactgatggtgctgagctccccactggctttgtctggggacacccgaccacgtttcctgtggcagcctaagagggagtgtcatttcttcaatgggacggagcgggtgcggttcctggacagatacttctataaccaggaggagtccgtgcgcttcgacagcgacgtgggggagttccgggcggtgacggagctggggcggcctgacgctgagtactggaacagccagaaggacatcctggagcaggcgcgggccgcggtggacacctactgcagacacaactacggggttgtggagagcttcacagtgcagcggcgagtccaacctaaggtgactgtatatccttcaaagacccagcccctgcagcaccacaacctcctggtctgctctgtgagtggtttctatccaggcagcattgaagtcaggtggttcctgaacggccaggaagagaaggctgggatggtgtccacaggcctgatccagaatggagactggaccttccagaccctggtgatgctggaaacagttcctcgaagtggagaggtttacacctgccaagtggagcacccaagcgtgacaagccctctcacagtggaatggagagcacggtctgaatctgcacagagcaagatgctgagtggagtcgggggctttgtgctgggcctgctcttccttggggccgggctgttcatctacttcaggaatcagaaaggacactctggacttcagccaacaggattcctgagctgaaatgcagatgaccacattcaaggaagaactttctgccccggctttgcaggatgaaaagctttcctgcttggcagttattcttccacaagagagggctttctcaggacctggttgctactggttcggcaactgcagaaaatgtcctcccttgtggcttcctcagctcctgcccttggcctgaagtcccagcattgatggcagcgcctcatcttcaacttttgtgctcccctttgcctaaaccgtatggcctcccgtgcatctgtattcaccctgtatgacaaacacattacattattaaatgtttctcaaagatggagttaaaaaaaaaaaaaaaaaaaaaaaaaaaaaaaaaaaaaaaaaaaaaaaaaaaaaaaaaaaaaaaaaa

SEQ ID NO: 184 - DNA, 3140 bp, Homo sapiens
ctccggcccagccccggcccgcagtccagatccgagacccaaactccgcccgccccgccgcgcgactctcacggtccggcctccggcgcgcgccccttcggcctccctcttcctgcgccggcgcccggcccggcccggcccgtcctgacccggtcacgagggccgcgacggcccgcgcttctccttgcccttcctcctcgagcgcccgcgccaggcagcagccgggcagggatgctcctgcgctcccgggcggcctcgggcccagccacctgctcgccggggaagaggacacgcagaggagcagctggcttgcccggagtcctcccaccttgacccaagcatgcagggcccaccccgcagcctccgcgctgggctcagcctggacgacttcatccctggccacctccagtcccacatagggtcttcctcccgggggacacgggtgcccgtgatccggaatggtggctccaacacccttaatttccagttccacgaccccgcgcccaggactgtgtgcaatgggggctacacaccaagacgagatgcttcccagcacccggaccctgcgtggtatcagacctggccaggccctgggagcaagccctctgcaagcacaaagatccctgcctcccagcacacccagaactggtcagccacgtggaccaaggacagcaagcgtcgggacaagcgctgggtcaagtacgagggaatcgggcccgtggacgagagcggcatgcccattgccccccgatccagcgttgacagacccagagactggtaccggagaatgttccagcagattcaccggaaaatgccagacttgcagctggactggaccttcgaggagccacccagagaccccaggcatctaggagcccagcaaagacctgcccacaggcccggcccggcaacatcttccagtggaagaagctgggaccactctgaagagttacctagaagcaccttcaactacagacctggagcattctccactgtgctgcagccctcaaatcaggtgctcagacgccgggaaaaagtagacaatgtctggacggaagagtcctggaaccagtttctgcaggaactagagactgggcagaggcccaagaaaccgctggtggacgaccctggtgagaagccctcccagcccattgaggtgctgctggagagagagctggccgagctgagcgccgagctggacaaggacctgcgggcaattgagacccgactgccgtcccccaagagctcgccggcgccccgacgggccccggagcagcggcccccggccggcccggcctcagcctggagctccagctacccacatgcaccttacctgggttccgcccggtccctgagtccccacaaaatggctgatggaggaagccccttcctaggtcggagggactttgtctacccttcctcaacccgagaccctagtgcctctaacggagggggcagcccagccaggagggaagagaagaagagaaaggccgccaggctcaagtttgacttccaggcgcagtcccccaaggagctgactctgcagaagggtgacattgtctacatccacaaggaggtggacaagaactggctggagggagagcaccacggccgcctgggcatcttccctgctaattatgtggaggtgctgcccgcagatgagatccctaagcccatcaagcccccgacctaccaggtgctggagtatggagaggctgtggcccagtacaccttcaagggggacctggaggtggagctgtccttccgcaagggagagcacatctgcctgatccgcaaggtgaacgagaactggtacgagggacgcatcacgggcacggggcgccaaggcatattccctgccagctacgtgcaggtgtctcgtgaaccccggctccggctctgtgacgacggcccccagctccccacgtctccccgcctgaccgctgccgcccgctcagcccgtcaccccagctccccctcagccctgcgcagcccagctgaccccatcgacttggggggacagacctccccccgtcgcactggcttctccttccccacccaggagcctagaccccagacccagaatcttggcacccctggtccagctctgtcccactctcgaggtcccagccatcccctggacctggggacctcctctcctaacacctctcagatacactggaccccgtaccgggcgatgtaccagtacaggccccagaacgaagacgagctggagctgcgcgagggggacagggtggatgtcatgcagcagtgtgacgatggctggtttgtgggtgtctcccggaggacccagaaattcggaacgttccctggaaattacgttgccccggtgtgagtggtctccatggcaacttggagccagccaggatggggtggggagcggtggcactcgtgggagggagaggacccccgcccacatcctccttccccaggacctgagctcccagcatctgcagacgacccccgcagcctttccctcggacccccctcgaagccccctggactgattcccacccacgactcacaggcattcctcccacagccctttcatttcctccccaccccactccccaaatacagaggtctgctttgaagcggagaccatttccaggccttattgagaccagaccccaagtcccccacccccatcctgctccagcgtttcctctaacagggaccagctctccgctttgcccccacggggttcctctaaccagaaccagcttcctagcctcgtagagaccaaaggccgcccccgcctgctggggttcctcccagcaccccagcttgctggctgccctctttgccttctggcctccagctgggtgtgggggggcggagcaaggcgggggacagacgcagcaccttcttagcgatctaggcctggcaagagctctggccccaaggcctcctcttcccaggggctgccaagtcctggccctggccctggcatatcaccccgcactgtggggccaggcaccactagcctggctcaaatattccccagggagactgctgtgtgctgcccgcctgcctgctggctctcccccagccccacatcccctctggaagagaatgtaaaataaacctggacacaagggaaaaaaaaaaaaaaaaaa

SEQ ID NO: 185 - DNA, 3318 bp, Homo sapiens
ggaggccgagctcggctgggcttggcgaggctgcggcgcggccaccggcgggagtgcagcggccactgtacccagagattcaaaaccccaaacccgggacttgggggcgctgagccgggccgggaagcagagcctggtcgtgaggaacagccgcccgttgctgtctgcccctttgcggacagcgtctccctcgactccgcttaggaagtggtgggggcggcgtggcccccgtcgggaggcgttcgaacgcccgctaggagagagaaaggattcccctgtgcttggagcccgcactcgggcgcggagggagcggcggcaggctctcgctttcggcaccatgggctgcacgctgagcgccgaggacaaggcggcggtggagcggagtaagatgatcgaccgcaacctccgtgaggacggcgagaaggcggcgcgcgaggtcaagctgctgctgctcggtgctggtgaatctggtaaaagtacaattgtgaagcagatgaaaattatccatgaagctggttattcagaagaggagtgtaaacaatacaaagcagtggtctacagtaacaccatccagtcaattattgctatcattagggctatggggaggttgaagatagactttggtgactcagcccgggcggatgatgcacgccaactctttgtgctagctggagctgctgaagaaggctttatgactgcagaacttgctggagttataaagagattgtggaaagatagtggtgtacaagcctgtttcaacagatcccgagagtaccagcttaatgattctgcagcatactatttgaatgacttggacagaatagctcaaccaaattacatcccgactcaacaagatgttctcagaactagagtgaaaactacaggaattgttgaaacccattttactttcaaagatcttcattttaaaatgtttgatgtgggaggtcagagatctgagcggaagaagtggattcattgcttcgaaggagtgacggcgatcatcttctgtgtagcactgagtgactacgacctggttctagctgaagatgaagaaatgaaccgaatgcatgaaagcatgaaattgtttgacagcatatgtaacaacaagtggtttacagatacatccattatactttttctaaacaagaaggatctctttgaagaaaaaatcaaaaagagccctctcactatatgctatccagaatatgcaggatcaaacacatatgaagaggcagctgcatatattcaatgtcagtttgaagacctcaataaaagaaaggacacaaaggaaatatacacccacttcacatgtgccacagatactaagaatgtgcagtttgtttttgatgctgtaacagatgtcatcataaaaaataatctaaaagattgtggtctcttttaagttttgcagttcatggtaaaatgcattttcaaaccaaatgagtacttatatatggatctctgtagactagagtcttgcagcaacacagaatgtaatataaggcaaatgcatctgggacttgaccaaagttgttctgttttgtttttttaactgaaagtaacagaaggacctttcttaaatgtgacagatggtcctgcagtgtgaaactgaaggacagtgttaaagctgggctctagtatattgatgatttctgcataagtgtaaatatgcaaatgtatgtatacatgtatttatgactttagttttcgacattatttttaggttttaagagtggcaacttaggattttagggtgatggctttggaaataacataaatataccttgtactgaatgacagactattactacgtttgccagttttaaacagctttatttatgttcatgtcctgtaaatttttaagtacagtaattaatattaggaaacattacagcccttatctagattatatgtatacttgtattaataaaaatgttatttgtacaaacattgcacagactattttaataacatgatttgttctttaaattttatgtgttttattgaaatgttcttaagatgaatacacctgcctttggatcaactatttaaacattgtatgcattttgatttttcctactttaagaaaataaaataatttaattttacattagattccacgttagatttggtttgaaaaactaaaatttcagatttctgaggatatactgtcttagacttattgtacacacttagtttttattcacttgttttcactctgaattttaatatttggctgatatgaatgcattgcctcaaaggtgatgtcatcttaatttttattcactttaaataactacatttttgtttataactaagtttggagggatcctaagagcatttttgtgggtaaaaaaaaaacctgtggacataatgaattttgagacattgattggtgaggcttttatttcccttgaggagtctcttgtacctagcatacatgatagctccttgttgggaagataacaagaaggatctttgaatactctattgctgatataatgcaagatttaaatttatacatataactaatttcaaatgtaattatcacactatgttaaaattacttttttcccttagataattcaaatttctccacttgcttgagattatatcatttctttttcaattatactattatttctgagaatgaaatggacgattacacttagaaaatgagtaatagtgtttaataagtcagtgattatatgtgtgctcaaataagtgttatgtatcagctagatactgagctttgatagaataattttcttttgattattcatgatgtgtcatctctgaccttgtttcagcaaagtaaacagcactccccaccccaccctcctttttttactcatcttggaaaaggttagtctttcagtacacgttgctggtaagtagtttccaagttacgtgttgtcactgggttgaagtatatttgtgtgtgtgtgtgtgtgtgtgtgtgtgtgtgtaaccataaactatattcatatctgtttcatttggaggattttcttctttgtaatgtaaagaaattcaaagttatcaaagttccttaaatgtgttagtttagattctttatgtgcctttcatgaaagatatgttttcattaattttactggtggacctgtaatatccacattgtgaagctgtgtatgaaattcaactataatatgaataaatttgaatcatgagaattatgggttaaaaagccacaaagaagcacatattggtgaccatcattaatgaaatcctgaactttattctgtgtaattgtgttaataaatcctaataaatttaaatttttaaaattttacaaac

SEQ ID NO: 186 - DNA, 1371 bp, Homo sapiens
tcaggaactggagcagcaaagagaagaacaaaagcgcagagagaaggaagcggaggagaggcagcgagcggaggaaagcaggctctgtgctccttgaagcaagcgctccagaggctccggaagccacggctggattggagacaagatgggatcctcagaggaccaggcctatcgcctccttaatgactacgccaacggcttcatggtgtcccaggttctcttcgccgcctgcgagctgggcgtgtttgaccttctcgccgaggccccagggcccctggacgtggcggcagtggctgcaggtgtgagggccagcgcccatgggacagagctcctgctggacatctgtgtgtccctgaagctgctgaaagtggagacgaggggaggaaaagctttctatcgaaacacagagctgtccagcgactacctgaccacggtcagcccgacgtcacaatgcagcatgctgaagtacatgggcaggaccagctaccggtgctggggccacctggcagacgccgtgagagaaggaaggaaccagtacctggagacgtttggcgttcccgctgaagagctttttacggccatctacaggtccgagggcgagcggctacagttcatgcaagctctgcaggaggtctggagcgtcaacgggagaagcgtgctgaccgcctttgacctgtcagtgttcccacttatgtgtgaccttggtgggacatggataaagctggaaaccatcattctcagcaaactatcgcaaggacagaaaaccaaacaccgcgtgttctcactcataggtggggctggagctctggctaaggaatgcatgtctctgtaccctggatgtaagatcaccgtttttgacatcccagaagtggtgtggacggcaaagcagcacttctcattccaggaggaagaacagattgacttccaggaaggggatttcttcaaagaccctcttccggaagctgatctgtacatcctggccagggtcctccatgactgggcagacggaaagtgctcacacctgctggagaggatctaccacacttgcaagccaggtggtggcattctggtaattgaaagcctcctggatgaagacaggcgaggtcctctgctcacgcagctctactctctgaacatgcttgtgcagacggaagggcaggagaggacccccacccactaccacatgctcctctcttctgctggcttcagagacttccagtttaagaaaacaggagccatttatgatgccattttagccaggaaataactgtttcttgtgacctggaactaacgtcaaagcacacaagacataataataaagacatgtacctccaaaaaaaaaaaaaaaaaaaaaaaaaaaaaaaaaaaaaa

SEQ ID NO: 187 - DNA, 2065 bp, Homo sapiens
gcatgttgacacatcaggcccagctctatcactggggagggagataggctgccagggacagaaagggctctttgagaaggccactctgcctggagtgggggcgccgggcactgtcccccaaggtcgcggcagaggagataggggtctgtcctgcacaaacaccccaccttccactcggctcacttaaggcaggcagcccagcccctggcagcacccacgatgcgggacctgcctctcaccagcctggccctagtgctgtctgccctgggggctctgctggggactgaggccctcagagcagaggagccagctgtgggcaccagtggcctcatcttccgagaagacttggactggcctccaggcagcccacaagagcctctgtgcctggtggcactgggcggggacagcaatggcagcagctcccccctgcgggtggtgggggctctaagcgcctatgagcaggccttcctgggggccgtgcagagggcccgctggggcccccgagacctggccaccttcggggtctgcaacaccggtgacaggcaggctgccttgccctctctacggcggctgggggcctggctgcgggaccctggggggcagcgcctggtggtcctacacctggaggaagtgacctgggagccaacaccctcgctgaggttccaggagcccccgcctggaggagctggccccccagagctggcgctgctggtgctgtaccctgggcctggccctgaggtcactgtgacgagggctgggctgccgggtgcccagagcctctgcccctcccgagacacccgctacctggtgttagcggtggaccgccctgcgggggcctggcgcggctccgggctggccttgaccctgcagccccgcggagaggactcccggctgagtaccgcccggctgcaggcactgctgttcggcgacgaccaccgctgcttcacacggatgaccccggccctgctcctgctgccgcggtccgagcccgcgccgctgcctgcgcacggccagctggacaccgtgcccttcccgccgcccaggccatccgcggaactcgaggagtcgccacccagcgcagaccccttcctggagacgctcacgcgcctggtgcgggcgctgcgggtccccccggcccgggcctccgcgccgcgcctggccctggatccggacgcgctggccggcttcccgcagggcctagtcaacctgtcggaccccgcggcgctggagcgcctactcgacggcgaggagccgctgctgctgctgctgaggcccactgcggccaccaccggggatcctgcgcccctgcacgaccccacgtcggcgccgtgggccacggccctggcgcgccgcgtggctgctgaactgcaagcggcggctgccgagctgcgaagcctcccgggtctgcctccggccacagccccgctgctggcgcgcctgctcgcgctctgcccaggtggccccggcggcctcggcgatcccctgcgagcgctgctgctcctgaaggcgctgcagggcctgcgcgtggagtggcgcgggcgggatccgcgcgggccgggtcgggcacagcgcagcgcgggggccaccgccgccgacgggccgtgcgcgctgcgcgagctcagcgtagacctccgcgccgagcgctccgtactcatccccgagacctaccaggccaacaattgccagggcgtgtgcggctggcctcagtccgaccgcaacccgcgctacggcaaccacgtggtgctgctgctgaagatgcaggcccgtggggccgccctggcgcgcccaccctgctgcgtgcccaccgcctacgcgggcaagctgctcatcagcctgtcggaggagcgcatcagcgcgcaccacgtgcccaacatggtggccaccgagtgtggctgccggtgacccctgcgccgcgcggactcctgccccgagggtccggacgcgccccagctcgcgccccttcccatatttattcggaccccaagcatcgccccaataaagaccagcaagcaaccggcaaaaaaaaaaaaaaaaaaaaaaaaaaaaaaaaaaaaaaaaaaaaaaa

SEQ ID NO: 188 - DNA, 2220 bp, Homo sapiens
ttggtagacgtgggcgtggctttgagattcccccatgctgcgatgtggggggagtctgctctgtctgtcctaactctctctgatcttctgacttgggaaaaacaaactcgaagttaatcattcccagctcaaagccttgtgcaagtgctctctgccttcacgcttgcttcctttgggagagaaccttcctcttcttgatcggggattcaggaaggagcccaggagcagaggaagtagagagagagacaacatgttacatctgcaccattcttgtttgtgtttcaggagctggctgccagcgatgctcgctgtactgctaagtttggcaccatcagcttccagcgacatttccgcctcccgaccgaacatccttcttctgatggcggacgaccttggcattggggacattggctgctatggcaacaacaccatgaggactccgaatattgaccgccttgcagaggacggcgtgaagctgacccaacacatctctgccgcatctttgtgcaccccaagcagagccgccttcctcacgggcagataccctgtgcgatcagggatggtttccagcattggttaccgtgttcttcagtggaccggagcatctggaggtcttccaacaaatgagacaacttttgcaaaaatactgaaagagaaaggctatgccactggactcattggaaaatggcatctgggtctcaactgtgagtcagccagtgatcattgccaccaccctctccatcatggctttgaccatttctacggaatgcctttctccttgatgggtgattgcgcccgctgggaactctcagagaagcgtgtcaacctggaacaaaaactcaacttcctcttccaagtcctggccttggttgccctcacactggtagcagggaagctcacacacctgatacccgtctcgtggatgccggtcatctggtcagccctttcggccgtcctcctcctcgcaagctcctattttgtgggtgctctgattgtccatgccgattgctttctgatgagaaaccacaccatcacggagcagcccatgtgcttccaaagaacgacaccccttattctgcaggaggttgcgtcctttctcaaaaggaataagcatgggcctttcctcctctttgtttcctttctacacgttcacatccctcttatcactatggagaacttcctcgggaagagtctccacgggctgtatggggacaacgtagaggagatggactggatggtaggacggatccttgacactttggacgtggagggtttgagcaacagcaccctcatttattttacgtcggatcacggcggttccctagagaatcaacttggaaacacccagtatggtggctggaatggaatttataaaggtgggaagggcatgggaggatgggaaggtgggatccgcgtgcccgggatcttccgctggcccggggtgctcccggccggccgagtgattggcgagcccacgagtctgatggacgtgttccccaccgtggtccggctggcgggcggcgaggtgccccaggacagagtgattgacggccaagaccttctgcccttgctcctggggacagcccaacactcagaccacgagttcctgatgcattattgtgagaggtttctgcacgcagccaggtggcatcaacgggacagaggaacaatgtggaaagtccactttgtgacgcctgtgttccagccagagggagccggtgcctgctatggaagaaaggtctgcccgtgctttggggaaaaagtagtccaccacgatccacctttgctctttgacctctcaagagacccttctgagacccacatcctcacaccagcctcagagcccgtgttctatcaggtgatggaacgagtccagcaggcggtgtgggaacaccagcggacactcagcccagttcctctgcagctggacaggctgggcaacatctggagaccgtggctgcagccctgctgtggcccgttccccctctgctggtgccttagggaagatgacccacaataaatgtctgcagtgaaaagctggagccccgattcctaaattttgtcactcaaattgaaacaaaccagctggccatggtggttgtcatcccagcactttaggaggccaccacaggaggatcactcccgtgatcaaaaccaacctgggcaacatgatgaaactctagctctacaaaacaaaaataaaaaaaaaattagcctgca

SEQ ID NO: 189 - DNA, 5656 bp, Homo sapiens
acaatgcaccgcacaatggcccgaccgccgccactaccggggcctgagggggcctggcggagcccgagcgcggcccggcccgcagcgtggggccccgagcgcggtgaagagattgttttctgaaagctgcgttggaggctgtgacagagctgagagcctgtgtggagcggatggggaggctttctcaataacatggccctttgccattagccttgccatgaccacatttttcaccagcgtccccccctggattcaagatgcaaagcaggaggaggaagtgggctggaaactagttcccaggcctcggggccgggaggcggagagtcaagtgaagtgccaatgtgaaatttcgggaacacctttctcaaatggggagaagctgaggcctcacagcctcccgcaaccagagcagagaccatatagctgccctcagctgcactgtggcaaggcttttgcttccaaatacaagctgtataggcacatggccacccactcagcccagaaaccccaccagtgtatgtactgtgataagatgtttcaccgcaaggaccatctgcggaaccatctgcagacccatgatcctaacaaagaggccctccactgctctgagtgcggtaagaattacaatacgaagctgggctaccggcgccacctggccatgcatgctgccagcagcggtgacctcagctgcaaggtgtgcctgcagacctttgagagtacccaggccctgctagagcacctgaaggcccactcacgccgggtagcaggcggtgccaaggagaagaagcacccctgtgaccactgcgaccggcggttctatactcgtaaggatgtacggcggcacctagtggtgcacacaggccgtaaggacttcctgtgccagtactgtgcccagcggtttggccgtaaggaccacctgacgcgtcatgtcaagaagagccactcgcaggagctgctcaagatcaagacagagcccgtggacatgttaggcctactcagctgcagctccacagtcagtgtgaaggaagagctgagccctgtgctgtgcatggcctctcgggacgtaatggggaccaaggccttccctggcatgttgcccatgggcatgtatggtgcccacatccctaccatgcccagcacgggcgtgccacactccctggtgcacaacacgctgcccatgggtatgagctaccctctggaatcctcacctatctcttccccagctcagctccctccaaaataccagcttggatctacctcatacttgcccgacaaattgcccaaagtggaggtggatagttttctggcggagcttcctggaagcctgtctctctcatccgctgaaccccagcccgcctcacctcagccggcggcagctgcggccctcctagatgaagcactgcttgccaagagccccgccaacctctctgaggccctctgcgctgctaatgtggacttctcccacctactgggctttcttccactcaacctgcccccgtgtaacccacctggggccacaggaggcctggtcatgggctactcccaggctgaggcacagcccctgcttaccactttgcaagctcagcctcaagattccccaggagctgggggaccactgaactttgggcctctgcactccttgcctcctgtcttcacgtctggcctgagtagcaccaccctgcctcgtttccatcaagcattccagtagcccccacagaggccctcagctcagtttttggctctgttatggagccttagtacccaccccgtctgtgtcccccatgaaggcagctgagctttcagagctgggttcaaaaaaaaaaattccagtgtctgtatacaggagcacttggtttgggggttcaggctctaggatcgattccagaaggagccttgagccccaaccccgtgaaaagatctcataccgtaggacttcaggtattatttacttttatttttttgacctgaatcgggagccacacttggccctcttcctctccaaagcgccagaacctccttctctttggagaatggggaggcctcttggagacacagagggtttcaccttggatgacctctagagaaattgcccaagaagcccaccttctggtcccaacctgcagaccccacagcagtcagttggtcaggccctgctgtagaaggtcacttggctccattgcctgcttccaaccaatgggcaggagagaaggcctttatttctcgcccacccattcctcctgtaccagcacctccgttttcagtcagtgttgtccagcaacggtaccgtttacacagtcacctcagacacaccatttcacctcccttgccaagctgttagccttagagtgattgcagtgaacactgtttacacaccgtgaatccattcccatcagtccattccagttggcaccagcctgaaccatttggtacctggtgttaactggagtcctgtttacaaggtggagtcggggcttgctgacttctcttcatttgaggtcacatttttcccccgtggggaaataaactgactttggactgcttcagtctctgccatcttccatgactgcatttgttcctgcctgcctcggcggtatccacagaagacaggcaagaggattggagcagttttctcacaggtctgcaattctgtttttctccaagtacattatgaccccctcatccttctcttgaactggagaggggaagaaatgaaaggcatgcccacgtccgtcacctccccatcccctagtccccaccttgaacatcatgagctgttgttattagtcttggaagcagagtctgggttggtgtggatagcaaaggaggaagtctgagcccctcattggtcttcctcccacctgtcccttttccgggaagttgtggaattgttggaagaagagtttgcagaaggttaggaatgggtagatagctaagtcctaatctatgggtacattgttgtgtcccaaaccaaaattttccttatccacaatgtcccttctgtctcttccactttacagtggactcggccactgtgcataggcttctctgctctccatcaaatcacttccactttcctgtgcccccacccccgcctccagttttccgctagtatccggcaaggtttcttgcaacaaatgattagttcttttcttctgactcgtggggctccctgctgcagagagcacagcccttgcctggagcccaggaaccccatccttgcttcatctcagttcttcatgggcttcactcttcccactcacggaagggaggtagctcagggacctccactgtgggacccttgagacgcttccactctgattcagaaacacacttctacctctttactgttaactcttaacagatgcagtcagcagtttctgggcacttctctcagtaggtgcctcatgctgacttctccagtagggtttcaggacaaactaccaaggaattgcctcagcctcctaccagtcctccctcacccaccttctgtctaggttcacttggtttgtcatcaggaactgagcaggtccaggactcagctttctgcttcagcctaagccagtactccttgtttgaggtaaaagccttaaaatttagctccctagctcttgattagaagcaatttggagtaagtgtgttttgatttaggcagggtagcttgggatacctttttaaaaacaccagatattaaaatgtctggcaaggttagaatcagactagatgatttgcttctaaaaattagtttcagtgagtcccagggactaattaaggtttattttaaaaagtgtctaccttggtacgcagccacctcctgcatgctgtgcatgttattgggacttgtattataggtgatggtatgtgagaatccagttgggactcgctgttgccatcctctttgttgtatctggttttcatcactagactcagcaacccttctcaccttaactgccaccttccctacactctcagtttacagaggccactgggcctctggctgcagaatacaaagtcccgggctgttagaggagtcctttcctctctgcctgccctttcctgtccctccctcgaattctctctccccgtaagtgatgctggaaaagtcataggactggcaaagcaactgtttaaaccctttgtaaccggggccttgcccccacctcctgtcttttctccttgccttccccactcctgtgtcctcccatctatcctgtctttcctttcctcctctcagtgtcctcagcacccacaaggaattttcctatcactgtgaactttgctggtacagaggaataatatctgccttcacctttttttttttggaccatagctagccagtcatttcttaaacctcccttcctaaaatctggggggtcggggggaaagaaaaaaaaagccttagtggcctggttgttcaaaggataagaatagctttatcctgcactcagtacccgaactcacttcagtatgcttactgaggccatgagaacctgaggggcatctgcccaggacaggagccatggcatatgacaaagaccaatgagggaccaggaaaaaaagtgatgtcccctttccctgccacctccagcctctgccagcaatgagctgtccccctcccaccctacacagtagctggtcagggctgagtacagtcctgggggtaaggggatgacatgcccaggtgtcagctcaaaggatctctgcatcatcttgaggtgggaggcagggaaaggagcgccaatgaggttccctgcaacccccgccctccagcccaccgcccaaccttttacaaatggcattttcttaattgaaaatccgggaagcaggtgtgattacttttttgctcgtagatattgtcctaagttggaattctcccactgccctaaaactttccctagtagtcctttaaactcccccctccctttttggtagctgttttctccgtcctctctccacctgccctcttatctaggagctgtttgtaagcacgatttttttaacaggttatattgtacaggatcaatattttgctttttaacaaggatatttatgtaataagaaactttgccttaggcaggtgttggccagaaaagtccagattcctctgggatcccaccctggcctctcctggaactctgaacctgctgtggaaggaattggccatgaccttcacctctggagagtagggtctatggcgagggaaaagggtgttcaccatgataacctagtgcctccatagaggggtttggaaaaattccagtccgatttctttgtgtgtcagctgacttccttagctgattgttcccacttgcacctctccacctttggcactagaactcctgagacaccacttctcatgcttctccctccctaccagcggtcaaggctttggagccactcttttgtaactccagattatttaaagagaaaagtacaagacagaaatcttctagcactttgtaaacacagtgaataacctcttggagtatttttggctttatataaaacaaggtttttaattgtaaagtataagtgccattagaaaatgcacagggcatatctttgttaaagtagatttttcaatgttttacagaattacattttcaaaaaaaggtttttataatgaagttgtttattaaaaacttctgaatgatgtgtt

SEQ ID NO: 190 - DNA, 5650 bp, Homo sapiens
gttggatacggcgcaaggttctgggctcctgctggcttttttttcctctctctcatcgacccccctttggttcccaccccccaccttttgcttttcgtatgtatgcatttttaaaaataaatcctgattttggaagctgagccggggaaaatgggcaacggtgattgggaccgaaggggagtctctccgtcactgttgctgggacgcgtgcctgtgctggtgtcttagagcaagagcctccctgagctttcggagtggaagaacagtggaagagactgcagcctaaagacttttaaaattaacttggcatcacttttatcagctcaaaggctaaacaaacaaacaaaagcagtgtcatttattctaagaaataacttcttaaaggttaaagctgaaaaatattcaagttatttttggataacaacttacagaggccaaatgacataggatgaaggctgttcgtaacctgctgatttatatattttccacctatctcctggttatgtttggatttaatgctgcccaagacttctggtgttcaactttggtgaagggagtcatttatggatcgtattctgtaagtgaaatgtttcctaaaaactttacaaactgcacttggacgctggaaaatccagatccaaccaaatatagcatttacctgaaattttccaaaaaggaccttagctgctctaacttttcactcctggcttatcagtttgatcatttttcccatgaaaaaataaaggatcttttaagaaagaatcattctataatgcaactctgcaattccaagaatgctttcgtttttctacagtatgataaaaattttattcaaatacgtcgagtatttccaactaatttcccaggattacagaaaaaaggggaagaagatcagaaatctttttttgagtttttggtattgaacaaggtcagcccaagccagtttggttgccatgtattatgtacttggttggagagctgcttaaaatcagaaaatgggagaacagaatcatgtgggatcatgtatacaaaatgcacctgccctcagcatttgggagagtgggggatcgacgaccagtcgctgattttgttaaataacgtggtgttacccctgaatgagcagacagagggctgcctgacccaggagctgcaaaccacccaagtctgcaatcttaccagggaggccaagcgaccacccaaagaagaatttggaatgatgggagatcatacaattaaaagtcagcgacctcgatctgttcatgaaaaaagggtccctcaggaacaagctgatgctgctaaatttatggcacaaactggtgaatctggtgtggaagagtggtcccagtggagcacatgttcggttacttgtggtcaagggtcgcaggtgcgaaccagaacttgtgtatcaccttacgggacacactgcagcggcccattaagagaatcaagggtttgcaataacactgccctctgtccagtacacggagtatgggaggaatggtcaccatggagtttatgttcatttacatgtggtcgaggccaaagaacaagaacaaggtcatgcacacctcctcagtatggaggaaggccgtgtgaaggacctgaaacacatcataagccttgtaatattgctctttgcccagttgatggacagtggcaagagtggagttcgtggagccagtgctcagtaacgtgctcgaatgggactcagcagagaagccggcagtgcactgcagctgcccatggaggctccgaatgcagagggccatgggcagaaagcagagagtgctataaccctgaatgtacagccaatggtcaatggaatcagtggggtcattggagtggttgttccaagtcctgtgatggcggctgggaaaggcgaataaggacctgtcagggtgcagtgataacagggcagcaatgtgaaggaacgggcgaagaagtgagaagatgcagtgagcagcgatgccctgcaccttatgaaatatgccctgaggattatctgatgtcgatggtgtggaaaagaactccagcaggcgacttggcattcaatcaatgtcccctgaatgccacaggcaccactagcagacgctgctctctcagtcttcatggagtggccttctgggaacagccgagctttgcaagatgcatatcaaatgagtacagacacttgcagcattcaattaaagagcaccttgctaaggggcagcgaatgctggcaggtgatggaatgtcccaggtgaccaagacactgttggatttaactcagagaaaaaatttctatgcaggcgatcttctgatgtctgtggagatcctgagaaatgtgacagacacatttaaaagggcaagttacatccctgcatctgatggtgtccagaacttctttcaaatagttagcaaccttctagatgaagaaaacaaggaaaaatgggaagatgcacaacagatttatccagggtcaatagagttaatgcaggtgattgaagattttatacacattgttggaatggggatgatggactttcagaattcatacttaatgactggaaatgtagtggctagtattcagaagcttcctgcagcctctgttctaacagacatcaactttccaatgaaaggacggaagggaatggttgactgggcaagaaactcagaagatagggtagtaattccaaaaagcattttcactccggtgtcatcaaaagaattagatgaatcatctgtatttgttcttggcgcagtcctatacaaaaacttagatctaattttgcccactttgagaaattatactgtcattaattccaaaatcatcgtggtcacaataaggcctgaacccaaaacaaccgattcgtttctggagatagaactagctcatttggctaatggtactttgaatccctattgtgtattgtgggatgactccaaaacgaacgagtctttgggaacgtggtccacccagggatgtaaaactgtgcttaccgatgcatcccatacgaaatgcttatgtgatcgtctctctaccttcgccattttggctcagcaacctagagaaataatcatggaatcctctggcacaccttcagttaccctaatagtaggcagtggtctttcttgcttggccttgattaccctagcagttgtctatgcagcattatggaggtacatacgctctgagagatccataatactaattaacttctgcctgtctatcatctcatccaatatcctcatactggttggacagactcagacacataataagagtatctgcacaaccaccactgcatttttgcactttttcttcctggcttcattctgttgggttttgactgaggcgtggcaatcatatatggctgtaactggaaaaattaggacacggcttataagaaaacgctttttgtgccttggatggggtttaccagcattagtagtggccacatcagtaggcttcaccagaacaaaaggatatggcactgatcactactgctggctctctcttgaaggaggactactctatgcttttgtgggacctgcagccgctgttgtcctggtcaacatggtgattggcattttggtatttaataaacttgtttccagagatggaatcctagataaaaagctcaaacacagagccggtcagatgagtgagcctcatagcggtttgacgctcaaatgtgccaagtgtggagtagtttcaacaacagctttgtcagccaccaccgccagtaacgccatggcgtctctttggagctcctgtgtggtgttgccccttctggctttgacgtggatgtctgcggttctggccatgacagataaacgctccatattgtttcaaatactttttgctgtgtttgattcattgcaaggctttgttatagtcatggtccactgcattcttcggagagaggttcaggatgcatttagatgccgattgagaaactgtcaggatcccatcaatgcagattcttcgagttcgtttcctaatgggcatgctcaaatcatgacagactttgaaaaggatgtagacattgcctgtcgatcagttcttcataaggatattggtccttgccgagcagccacaataacaggaacactttctaggatttctctaaatgatgatgaagaagaaaagggaacaaaccctgaagggctaagctattcaacattgcctggaaatgtcatttccaaagtcatcatccagcaacccacaggtttgcacatgcccatgagtatgaatgagcttagcaatccatgtttgaaaaaagaaaatagtgaattgcggagaactgtgtacttatgtacggatgataatttgagaggggctgacatggacatagtccatcctcaagaaagaatgatggaaagtgactatattgtgatgcccagaagttctgtaaataaccagccttcaatgaaagaagaaagcaaaatgaatattggcatggaaaccttgccgcatgaaaggctattgcactacaaagtaaaccctgaattcaatatgaatccccctgtaatggaccagttcaatatgaacttagagcaacatctcgcaccccaggaacatatgcagaatttgccctttgaacctcgcacagctgtgaagaatttcatggcctctgagttggatgataatgcaggactatcaagaagtgaaactggatcaacgatatcaatgagttctttagagagaagaaaatcacgatattcagaccttgactttgagaaggtcatgcatacaaggaagaggcatatggaactatttcaagaactaaatcagaaatttcaaactttggacagatttcgggatataccaaatacaagcagtatggaaaaccccgcaccaaacaagaatccatgggacactttcaaaaaccccagtgaatacccgcattacaccacaatcaatgtcttagacacagaggcaaaggatgctttggaactgaggccagcagagtgggagaagtgtctgaatttgcctctggatgtgcaagagggtgactttcaaacagaagtttaaaaaaatcaaaatggactaaggtagagacaaaactttattgcactgacacttaagacttgggaagcctgacatttctatctggacagtgtgactatcttatgtcaggaccttcatgtgccaaacgtcagtggtgttttcatatggtaacttctcactagtcaggctagtggagagatgaccaggtgtacagttctgaccatcctgtgttgtaagtacccgtggaatggatttgtaaggtaatctttatagataaacctcaagcaacgattcatgttgtaaccgcttcatatggtttagttttcaaaaaacttcaccatgaagcacaatgtatatatttatgcagtttttaaagtttataacagtctgtttggccattactacactttttactttataatataaaagcaaagtttttgtcattaaatgaatgtttgttgagctacattcttcattgctttaaatgcaataaagtaataatctcacttttatatgaataatatatttcacatctttattattgcagttttctctagaaagctctgagaagctttctctgctgcagctgtgtataaaatatttaaaatgttgtatggtgtaaataaacttttgtctacatatcaaaaaaaaaaaaaa

SEQ ID NO: 191 - DNA, 2553 bp, Homo sapiens
tggttgcgtcgggtcacgtgggcgcgcaggcgcagcgcggtgcagcccgttcgctcacacaaagcccagacgcggagaaaatggcggcaggggtcgaagcggcggcggaggtggcggcgacggagatcaaaatggaggaagagagcggcgcgcccggcgtgccgagcggcaacggggctccgggccctaagggtgaaggagaacgacctgctcagaatgagaagaggaaggagaaaaacataaaaagaggaggcaatcgctttgagccatatgccaatccaactaaaagatacagagccttcattacaaacataccttttgatgtgaaatggcagtcacttaaagacctggttaaagaaaaagttggtgaggtaacatacgtggagctcttaatggacgctgaaggaaagtcaaggggatgtgctgttgttgaattcaagatggaagagagcatgaaaaaagctgcggaagtcctaaacaagcatagtctgagcggaagaccactgaaagtcaaagaagatcctgatggtgaacatgccaggagagcaatgcaaaaggtgatggctacgactggtgggatgggtatgggaccaggtggcccaggaatgattactatcccacccagtatcctaaataatcccaacatcccaaatgagattatccatgcattacaggctggaagacttggaagcacagtatttgtagcaaatctggattataaagttggctggaagaaactgaaggaagtatttagtatggctggtgtggtggtccgagcagacattcttgaagataaagatggaaaaagtcgtggaataggcactgttacttttgaacagtccattgaagctgtgcaagctatatctatgttcaatggccagctgctatttgatagaccaatgcacgtcaagatggatgagagggccttaccaaaaggagatttcttccctcctgagcgtccacaacaacttccccatggccttggtggtattggcatggggttaggaccaggagggcaacccattgatgccaatcacctgaataaaggcatcggaatgggaaacataggtcccgcaggaatgggaatggaaggcataggatttggaataaataaaatgggaggaatggaggggccctttggtggtggtatggaaaacatgggtcgatttggatctgggatgaacatgggcaggataaatgaaatcctaagtaatgcactgaagagaggagagatcattgcaaagcagggaggaggtggaggtggaggaagcgtccctgggatcgagaggatgggtcctggcattgaccgcctcgggggtgccggcatggagcgcatgggcgcgggcctgggccacggcatggatcgcgtgggctccgagatcgagcgcatgggcctggtcatggaccgcatgggctccgtggagcgcatgggctccggcattgagcgcatgggcccgctgggcctcgaccacatggcctccagcattgagcgcatgggccagaccatggagcgcattggctctggcgtggagcgcatgggtgccggcatgggcttcggccttgagcgcatggccgctcccatcgaccgtgtgggccagaccattgagcgcatgggctctggcgtggagcgcatgggccctgccatcgagcgcatgggcctgagcatggagcgcatggtgcccgcaggtatgggagctggcctggagcgcatgggccccgtgatggatcgcatggccaccggcctggagcgcatgggcgccaacaatctggagcggatgggcctggagcgcatgggcgccaacagcctcgagcgcatgggcctggagcgcatgggtgccaacagcctcgagcgcatgggccctgccatgggcccggccctgggcgctggcattgagcgcatgggcctggccatgggtggcggtggcggtgccagctttgaccgtgccatcgagatggagcgtggcaacttcggaggaagcttcgcaggttcctttggtggagctggaggccatgctcctggggtggccaggaaggcctgccagatatttgtgagaaatctgccattcgatttcacatggaagatgctaaaggacaaattcaacgagtgcggccacgtgctgtacgccgacatcaagatggagaatgggaagtccaaggggtgtggcgtggttaagttcgagtcgccagaggtggccgagagagcctgccggatgatgaatggcatgaagctgagtggccgagagattgacgttcgaattgatagaaacgcttaagcagttgccttttttaaacatcgatacgagacctctgaatttgtattttttcttgttaaccattttaatttgttggctggatgtataaagatgtttaaaaaattcagttgctttttggggtaatttgaattacttttttaatgactggggttccatttgactgtttgcattgagattgcaatgtgcgcaattttttttgtagttgtggcatcttgttgacatcgaatatgactttgataataaataccggttcctgaaaaaaaaaaaaaaaaaaaaaaaa

SEQ ID NO: 192 - DNA, 2416 bp, Homo sapiens
agagaacggcagggaagctgcagcgagggctggcagctggcagagccctgagcacccagcacccagcccggcttgcagcccaaagcctggagagaggctgctgcgccattgacctgtggactccagagactcccgctgtgcattcctctgatctggaaggtttcctgaattacgtgacgagaaacctgggttcgagtcctaacttgtcaccaacttcctgagtgacctgggctggtcccgtcccctcttggaatctctgtcttccatctcttcagcgaaggggttgatttataagggtgttttctgctctgacactgtgatttgaattctgtgtttccacatgatattcgagaagtctggccggaaggatggaatctgaaatgacaatggttctggactgggctttgtgctcagcccagctcatctttgcctgagacctaggagtggccccaggctctcctgatgtgccaccacgcttggcatctgctcctctccctgcccccatattcccatgctctgaaggggagttctctttcatagcaaatccgagaggagccgaggagccaggtcctttgttccagacccagaagcagccatggggacctgtgacattgtgactgaagccaatatctcatctggccctgagagcaacaccacgggcatcacagccttctccatgcccagctggcaactggcactgtgggccacagcctacctggccctggtgctggtggccgtgacgggtaatgccatcgtcatctggatcatcctggcccatcggaggatgcgcacagtcaccaactacttcatcgtcaatctggcgctggctgacctctgcatggctgccttcaatgccgccttcaactttgtctatgccagccacaacatctggtactttggccgtgccttctgctacttccagaacctcttccccatcacagccatgtttgtcagcatctactccatgaccgccattgctgccgacaggtacatggccatcgtccaccccttccagcctcggctttcagctcccagcaccaaggcggttattgctggcatctggctggtggctctcgccctggcctcccctcagtgcttctactccaccgtcaccatggaccagggtgccaccaagtgcgtggtggcctggcccgaagacagcgggggcaagacgctcctcctgtaccacctcgtggtgatcgccctcatctacttcctgccgctcgcggtgatgtttgtagcctacagcgtcatcggcctcacgctctggaggcgcgcagtgcccggacatcaggcgcacggtgccaacctgcgccacctgcaggccatgaagaagtttgtgaagaccatggtgctggtggtgctgacgtttgccatctgctggctgccctaccacctctacttcatcctgggcagcttccaggaggacatctactgccacaagttcatccagcaagtctacctggcactcttctggttggccatgagctctaccatgtacaatcccatcatctactgctgtctcaaccacaggtttcgctctggattccggcttgccttccgctgctgcccatgggtcacacccaccaaggaagataagctcgagctgactcccacgacctccctctccacgagagtcaacaggtgtcacactaaggagactttgttcatggctggggacacagccccctccgaggctaccagtggggaggcggggcgtccccaggatggatcagggctatggtttgggtatggtttgcttgcccccaccaaaactcatgttgaaatttgatcccaatgtggcagtgttgggaggtaggggttagtgggaggtgtttgggtattggggatggatcccttatgaatagattaatgccttccagttgaagtgaatcatcactcttgtgggaatggactagttcccaaaataacaagttgttagaaagagtgtggtgtcctcagtttccctgtcttgcttcctctctcaccatgtgatctctttgcacacaacacttcccttccactttccaccatgacaagaagcagcctgaggccttcaccagatgcagctgcccaatcttggatattccagccaccagaatcatgagccaaataaacctcttttctttataaattacctagtctcaggtattccatgaaagcaacacaaatggactgagataggtgcctattgaaccctgaagccttgtgcctggctgcagaatgaggtgtagcaccctttgagaagtagccaatcgagaagaccacatctgaaagttcagctcatgccccatccttcagtataccaatacaaagacaacatggggccagaactccagaaaggatgctgactttaagaggactcagccacccatctcagagagcacttcagaggatccagtaagggtcagaaaag

SEQ ID NO: 193 - DNA, 9369 bp, Homo sapiens
ctgtgggtaggcggcggcggcggcggctacgcggagcggcaggcggtggagcgaggccgcgcgcgccgaagatggctgagaagcagaagcacgacgggcgggtgaagatcggacactacgtgctgggcgacacgctgggcgtcggcaccttcggcaaagtgaagattggagaacatcaattaacaggccataaagtggcagttaaaatcttaaatagacagaagattcgcagtttagatgttgttggaaaaataaaacgagaaattcaaaatctaaaactctttcgtcatcctcatattatcaaactataccaggtgatcagcactccaacagatttttttatggtaatggaatatgtgtctggaggtgaattatttgactacatctgtaagcatggacgggttgaagagatggaagccaggcggctctttcagcagattctgtctgctgtggattactgtcataggcatatggttgttcatcgagacctgaaaccagagaatgtcctgttggatgcacacatgaatgccaagatagccgatttcggattatctaatatgatgtcagatggtgaatttctgagaactagttgcggatctccaaattatgcagcacctgaagtcatctcaggcagattgtatgcaggtcctgaagttgatatctggagctgtggtgttatcttgtatgctcttctttgtggcaccctcccatttgatgatgagcatgtacctacgttatttaagaagatccgagggggtgtcttttatatcccagaatatctcaatcgttctgtcgccactctcctgatgcatatgctgcaggttgacccactgaaacgagcaactatcaaagacataagagagcatgaatggtttaaacaagatttgcccagttacttatttcctgaagacccttcctatgatgctaacgtcattgatgatgaggctgtgaaagaagtgtgtgaaaaatttgaatgtacagaatcagaagtaatgaacagtttatatagtggtgaccctcaagaccagcttgcagtggcttatcatcttatcattgacaatcggagaataatgaaccaagccagtgagttctacctcgcctctagtcctccatctggttcttttatggatgatagtgccatgcatattcccccaggcctgaaacctcatccagaaaggatgccacctcttatagcagacagccccaaagcaagatgtccattggatgcactgaatacgactaagcccaaatctttagctgtgaaaaaagccaagtggcatcttggaatccgaagtcagagcaaaccgtatgacattatggctgaagtttaccgagctatgaagcagctggattttgaatggaaggtagtgaatgcataccatcttcgtgtaagaagaaaaaatccagtgactggcaattacgtgaaaatgagcttacaactttacctggttgataacaggagctatcttttggactttaaaagcattgatgatgaagtagtggagcagagatctggttcctcaacacctcagcgttcctgttctgctgctggcttacacagaccaagatcaagttttgattccacaactgcagagagccattcactttctggctctctcactggctctttgaccggaagcacattgtcttcagtttcacctcgcctgggcagtcacaccatggatttttttgaaatgtgtgccagtctgattactactttagcccgttgatctgtctctagtttctttctgttattgcactatgaaaatcagttatattctttaaatttttatcttacttttggataatatccactgcaatactaattgagaaacatgaattatttccaggggcacacaatgctattgaaattactgaaaacaaaatatctgacatcttatttacttgtagaaatctgtaattctattgtgcctatgataaattcacataggcaatatctttaataggttaatatcaatgaagatttttaattacaataatgagttcactacagacgattaacacaccacactggcgaaccatctcaatgtaagggtggtttggcaacacctccttgctttgctgtttggtgtaggtaaatctagtttacttcctaaatttcagtaggctttatgctgtgtttatgcccccaatttattttaacaaaagaagattaaaaagtaaaagaaccacgagtaagatattatttaaatgttgaaatcttaaaaacctgcctccaagatttcagaagccaagtttttctaacagtatttgtacaaatactgcctagtgtattcaacagaaggactgtggtcatgtaacaggtaaccacaattttcaggtttcttaaaaacagctgtaactaactcaggatttttatcttgagatttccctgaataatatatttatcttaagagccttcaagtttcaaattaatattggaacatctggaattgcaacaacttttgtcttttacataaacttacgtcatttaaaaaatgtcttcaaaatctacctttctcaaattctttttgcctctatttatttttgcatttcaccaacagtgataaaatagttaaatgaaacaaagcaaagtatcaacagtcccttaaatgagaatccttatctttgatctttattttctgtgttaggtgttagggtcctggtgcagctcataatgctaattcttcattggaagccactcccttcacctcacctcacctagtcactattgtctttgttcattgtttgatcctgagtggttgattgatatagctttgaatcttttctagtccaagtttgaaaacactgttctggccctaagggctggctatgacctttactgttgaacctgatagggcagggaagctttgaacatcaagaaaaaatttttatcttaaataaataaatatatatattcacacaccagtgcttttaagcaaaaaccagtttttttgtttgtttgttttgctttgtgcaggttttctttaagattaaaaaaacacaaactatagcagggtagataatagtttattgattatattttgttttagtaaaagtatttaattttaaattctgtgtaatttatctaatttgtatttattcatttgttatttttatgttgtaattaacacttatttacctggattaccctaaaaaaattaagctcttgaaaacaaaaaaatgacattaccttgacaggcttctctttgccaaaagtaatgtatgttctgccaagaagcaaatgagaatgttagactaagtttctcctgtgttagtggaaaacaagtgtgtctatctttaaatattctttgaatcaggagtttgcgttgtgtcacatcatatggctttgcagatcttttaaaaactgatgttaaataacttataagtccaacttcttaatatcaagataaatgaatagttcaccaatttgggaaggagggcgggttgcaatttgagatagtttaaggtttaattattgaaagactgccatcttgtggcaccaaaaggtaatttttacatgattatttgtatagtgataagcagtcctgctgtgttagcctggtccattatagatatggcatagttttgggttctctaaatgggtccatacctcttttgggaaaaaacagggccacctcataatatttgcctgattatgaatggaattaccttagaaataaggaactaatcagattacttaaccccaatgacaaaatccacaaaaattttgaaggcagagaaacagaaggaatccagtgatgttttagctccattagtctaataggtcagatattaaaaaattgttcatatcaaaattaccttatatggattattgccatgttttttgagagttaattatttactgttttctaattcttgccagtatttatgaacagctgtagcttgatatttacctactgaattttaggagaactaatggtcacagtttgggttcttttatgtgtatgtttttaaaacagctattttgtgaatctaggtggttggtttttagaagatttcaggagatgcagtccagcacaattagagctggaacattgttacagcaggctttttgttgctcatgggcagatagagggaaagaatcagttgttagccccaaatttccacatttcagtgttgtaaactctgaatgtgataggtagatgtgggctaagaataatttcctccagtgaagacacgggagaagagcttctattatgaggttatagataaggccttagttatatcatggaaatggactccatgtagttctagaactgcatttcccaaagtatatcctgtgagatgctccacagaaaaaatgattgcatggactaagtttgaaaaatgttgcatgctactcttcccctcgaagatgacagtggatgtcagcattaaagactttgacaggtctttctgtgaaaaaaagaaagccacataactttgttgaactttgcccaaattaatttttcattttaaaaaacttaatagcccatgaaaagcaaatttgggaaatacattttttaggaaaatactgtcccagaatgccataattagggtagttaataattaacacttccatttctcttactggttgttgggagaatctgattgaaaattagaattactttgttttaacttgcagacatgttcatcgtgagtgaatgctggattaaatagaattttctgtgtctgcaacttgtttcatgacaccttggttttcttaatcatcttgtattattatttgagtgcaacattattcttatgcatgggtgactgaaaaacctgaaacaagattacttgttaaaaaaaagtctaagagactaatgactcatgcttatggctcagtgggtaatgaatcagtgtcactgattcttacttttaaaatgtgtagtcagtgaacattttctaaatacttttctttgggataccatatgaagatctaattccttatgtttcagtgtaggaacagctaccttctcaaatagaatatgcagggagggaagtaggcaaaccatttacaagttgggtttttgttttgattaacctgttaagagacacttttgtaatctctagtgtttacattcctttatactagctatctataaagagaatccagaaggctaaattaatcagaaataattatatttctatgtcagggtattggctatatgtagcatgaacaattctccattttctgcaaatgggtttttcaggacagttttataattctgagtttgctttttcttattccctagacagtttgtactcagggaatacaaattgatttttactgttaaatgagacatagtttagaaaaaatcataagcaactattgtagatttttgatctgtttggatttatctgtagcattgaataatgtgcagtgtactgagttaatgtaggcacctcactttggatttataaaatgtaaaaacctggaacatgcctgccacagacaccactttgtctattcaccgggtactaatttacatcctattaatggttgtaaaagctgagtgtctaaatgctagacatgttcacaattttgtctgtttttgtttatttgtttttaagacccaaaccttttcaatcttgcatttatttacttggttctcctgtgtcaccctgtggctttttaaatagggaatgtaatttattttaatagtagttctcaaagactctattaaaaactctggacgagggatatgtgcaatctgttggtaagtcacatcctatgtttggcctcatttttataactcctaaaatgagaaaggtagattttaacacttctaaggtacctttgagctttaaagttcttttctgcttttccatatgatttgtgttagtgttcactttttatatatttagagtttttatatgagtgtgaatgtttctgttttgatttggtgaggcatgtcagaggtatatacttgaatatttttctaaatacagctgctggaggaatgcaaatggcaaaaatcatccagaaaaccaaacacggtgaaacatcacatccatttggcatgaagcaaagcattacaaatttggagtgatgaaagtgttccatatattttttatagtgatttttcgatctagagacccttcatattgtttacttactattacgataactttgagaggtaaccagagaaagcatttttgccatttccagatgaggaagcaggaccagaaagctcttcataaagctttaacaccatacaagtatccagcagtgatcaattgctctttataggaaaccacctttcctctggggaagaacagtctgaattaataaaacatcagagtggttgagtagtaaaaataaacacagatgtattgctttcaagtcttagagtgacataaagtagtcttaaataaatagttcttagtttattttaagcagttgattgtactaacgagatgtaattatctgaagtatttatgattagcatattggtttttataagtatttctgagttattgagggtgcttaaaaatgctgaagaaactttaaaacatgattcttcttataattttatgtgattcttatagcacaatcatttttgaaaaaggaaaactaggctgggtgtagtggctcatgcctataatcccagcactttgggaggccaaagtgggtggatcacccgagttcaggagttcgagaccagtctggccaacatggtgaaacctcgtctctactaaaaataccaaaattatccggtgtggtgacaggctgcttgtaatcccagctactcgggaggctgaggcacgggaatctcttgaacctgggaggcagagattgcaataagccaagatcatgccactgcatgccagcctgggtgacagcacaagactgtctcaaaaaaaaacaaaaaaaggaaaaagaaaactagccccagtccctgtctaaattgttatagtttttgactattatctgaattagtcttatccaaatttcatatgcagattgatttttcattttgtatgtatattacatgatataactattttcatagaatatatttctaatttacaaacactgaattattagcttgatagagtttctcccaaaccttataaaactttgaaatgtacttatgtttgagctttaaaaattataaaaacttcatttaaacaagttgctggcatcattactagcctttccacctataattatgatgcatttgatgccactgaacagtaatagcacaaagaacaggtcacacagtctagactggattgagttttaattaaacttcttcatccatagcctgataagaatcaggctgggtctagaagagttatcagactgtaggcctgtattaattttgcaagctaatgttaatgtttactgccagccttgcatagcaatgccagtttgcagttgtgactatgatgtgacttttggtaaaaatggtttatatctaaagtagtttagattttatggaagtggctcttgattgtttggacaagcagggtaggtaaatttcaattacgtttgaagtgtaattaaatcctagaatagagcactctccagaaaaaaaaatgaaaaaagaatttggagaatatcctggcatgaaaacttttttgaataatacgtagaattttgacaaggttcatacagtgcatacagtgtgaccttttctgaggtgggcagggagggttgctacgttgtgttgatttaaaatttcaaggaggaacaaaaacattctagccaaggagaattgcattgttatttttttttctactaatttaaacgtgcatttttcacagttacacatttaagttttgctaccaaaaatggccatttttctagacagataacattttcctaaagtggaagagagatccactgttctaaaaaaaaaaaaaaaaaaaaacactaaattgtgccttctcccttaaattataagaagagtaatagtaaaaacttgtttaaactatattttctttttttctaatccctctcagttctccttagatctgcctcctacaaatgatcatgttgtttgcatctgcctgattgagttcccttggtcaaacctctccctatcactatcagaagttgttcactaaatgtattttcctatttctttcatgttgattgactttataagtcaccttggtaaacataacatttggctaccttctcatgctttataaatgaatttgatgaatggcagtttttatattttaaccctttaaaaagtttgtcaaggaaacaactcagagctaagaacaaaatctaacttggaatcagtttcttcctttggctgctgaagcagcagcaagtcacgtaacctcatttagttttttgatttacaaaatgtggataataacctacctcacagatgtgtgtgagcaactgtttgaaagcccttgtttaaatacagggtttatatccccacattcaatgtaaattcctttttttaaaaaaaataagtatctttgatactgataggatgagtatcttgatttttaggtaagatcacagtttcacaaattgtggtgttgttaggtgacatttaatatttcttgagacctcaagtattcaaatatcaaacttgtcctgtgttgtaacaaatattcagaatctcttaaaatgttggctgaagctgccttaatgtaccaaaatacagctctcaagactgttcacaaatatctgtggttgtacaatgttttgaacatttaatgtaaagttgttgtagaactgtgaactctaaggatagtatctttattgttttaggaagaatggttgtgttctttgtcatgtatgcttaaatatacagtggattttgaatgcaacaaataaaactgaaaacagccatttggttgtgtcatgacaatcataatataggatataatatttactttttttcaaaaacatcctgcattcattcattcttagcatacctttgaaaaagaaaaaaaaatccataggttgatacattgacccattgaagtacttcattacgtatttattgaaaattttttttaattgttgaaattgggaccactttttataattggtttcaagaaaaaaaaatgaacagacttccagtgcttttctgttcaaataaactccgattcaaatttcagttttgtttgttatatactttttgtgagtgttaaatgatatgggaaggatttgtctttcattaaccatatggaaaagatgtcttcctgaattacatagcatttcatagttacagattcttcctaattaatgtttgcaccatatgaaactcataggtaacaaacacaaaggagaaaagcagcctgtctgattgcttataagcttttttcacaaaatcaaattaaaagtctctgattcatttgaaagctaaaaaaaaaaaaaaaaaa

SEQ ID NO: 194 - DNA, 5673 bp, Homo sapiens
cacgctctgatggcggtcactgctggagctctgtccatttcgtaggaccggtcctcgctcggtaccgtgagagcttgctgcctccctcctttgtcctcttcataggcctgcgcatcgtccccgagggcgcaggccttctgctggccggcagcatgggccgggagtctcgccactaccgaaaacgctcagcatctcgaggtcgttctggaagtcgatcgaggagtcgctcaccctctgacaaaagaagcaaacgtggggatgacagacgctctcggagcagagacagagaccggaggagagagaggtctcggagtagggacaagagaagatctcggtcaagggacaggaagcgcctgaggcgctccagaagtagagagcgagacagaagccgagagcggagaagatctcggagcagagatagaaggcgctcaaggagtcgaagccggggcaggcggtcccggtcctccagtcctggcagcaaaaccaagaagactgagaacaggtctaggtccaaagagaaagcagaaggtggggacagctccaaggagaagaaaaaggacaaggatgacaaggaggacgagaaagagaaggatgctgggaactttgaccagaataaactggaagaagaaatgagaaaacggaaagaaagagttgaaaaatggcgcgaagagcagcgtaagaaggctatggagaacataggagagctgaagaaggagattgaggagatgaagcaggggaagaagtggagcttggaggacgacgacgatgatgaagatgatcctgccgaggctgagaaggaagggactgaaatggaggacgaggagctggacccattagacgcctacatggaagaagtgaaggaagaggtaaaaaagtttaacatgaggagcgtgaaaggcggcgcaggaaatgagaagaagtctgggccaacagtcacaaaagttgtcactgtggtgaccaccaagaaagcagtagtagacgcggataagaagaagggggaactcatggagaatgaccaggacgccatggagtattcctcagaggaggaggaagttgaccttcaaacggccctcacaggctaccagacaaaacagagaaaacttctagagccagttgatcatggaaaaattgaatatgagccattcagaaaaaacttttatgttgaagttccagaattagcaaaaatgtctcaagaagaggtgaatgtgtttcgattggaaatggagggcattacagttaaaggaaaaggttgcccgaaaccaattaaatcatgggtccagtgtggaatttccatgaagatactaaattccctcaaaaagcatggctatgaaaagccaacaccaatccaaactcaagcgattcctgctataatgtctggacgagatttgattggcattgccaagacaggaagtggaaaaaccattgcttttcttttgcccatgtttagacacatcatggatcagaggtcattagaagaaggagagggaccaatagctgtcatcatgactccaactcgagagctggctttacaaatcactaaagaatgtaagaagttttcgaagaccttgggactgagagtggtctgtgtgtatggagggacaggaatcagcgagcagattgctgagctgaaaagaggtgctgaaattattgtttgcacacctggtcgaatgattgacatgttagcggctaacagtggtcgggtcacaaatcttcgaagagtgacatatgttgttttagatgaagcagacagaatgtttgacatgggttttgaaccacaggtcatgcgcattgtggataacgttcgtcctgaccgacagacagttatgttttcagccactttccctagagctatggaggctttggcccgcaggatcctgagcaaacctattgaagtgcaggttggaggcaggagtgtggtttgctccgatgtggaacagcaggtgattgtgattgaagaagaaaagaaattcttgaaattgctggagcttttaggccattatcaggagtcaggatctgtcattatatttgtggataagcaggaacacgcagatggtcttctgaaggacttgatgagagcatcgtacccttgcatgtctcttcacggaggtattgatcaatatgacagggacagtatcataaatgactttaagaatggaacctgcaagctcctcgttgccacatctgttgcagctcgtggtctcgatgtgaaacatctaattcttgtagtgaattacagctgccccaatcattatgaagattatgtgcacagagctgggcggactggaagagcgggcaacaagggttatgcctacaccttcatcacagaggatcaagctcgatatgctggtgacatcattaaagctcttgaattgtcagggaccgcagtgcctcctgacctagaaaaactctggagtgacttcaaagatcaacagaaagctgaaggaaaaataattaaaaagagtagtggcttctctggcaagggattcaagtttgatgaaacagaacaggctttagccaatgagaggaaaaagctgcagaaagctgctcttggcctgcaagattctgatgacgaggatgctgcagttgatattgatgaacagattgaaagcatgtttaattcaaagaagagagtaaaggacatggctgcacccggcacatccagcgtgcccgcgcccactgcaggcaatgctgagaagctagaaatcgccaagagattggctctcagaatcaacgctcagaagaacctgggcatcgagtctcaggatgtgatgcagcaggccaccaacgccatcctcagaggtggcactatcctggctcccactgtgtctgcgaaaaccattgcagagcagcttgctgagaagatcaatgccaagctcaactacgtgcctttggagaagcaggaggaagagagacaggagggtgggcagagcgagtctttcaagagatacgaggaagaattagaaattaatgacttcccacagactgcgaggtggaaagtcacctcaaaggaagccctgcagaggatcagcgagtactctgaggccgccatcaccatcaggggcacctacttccctcccggcaaggagcccaaggaaggagagcgcaagatctacctggccatcgaaagtgccaacgagctggctgtgcagaaagcaaaggcagagatcaccaggctcataaaagaggaactgatccgactgcaaaattcataccaaccaaccaacaaaggacgatacaaagtattataaacatcggagccactttgtacctttgctgtctgtgacgtttacagtgtattgtaaagtaaggcttttaaaattctgtcttgcttattttttaaatacaagaaaccagtgtttgttcaagaggtcgtctgtaagtactaccccatacccatccaaaaccatctacattagacctgttttcagaatgtgatgttcttcaatgtaaaccttagataccaacactttaaatatctggaagacattggaattttgtactgaatgctgtaataaagtctgtcaggcactaagggccactgacctgtcctttcagtggaattgtggtgtgctcatcacctaagaaaggtaaaaagctctggtcatagcctgctgagcttacacctcgcagactggagcatgtgagcaggaccctagagtgctgtgatggaagtttacaaaacaggctcagagtttttattttaattttatctgaaacgagtaatagtcaagccctggcttataaaattaaacataagtagtataatgggatttctgcatttcttttttatttcttcctacttttgagaaagtcactgtggggcatgggctggccttgaacttgtgatcctcctccagctgtctctccagtgcttggttttagcacacttggctctccacgtctttctactgtgctagtgttactatttaaggttttctctcgcccctggttttgcctaagtgctgacttctttattgactcctttagagaaagttattatgaccaatacatactccatgttaatcctgtccctcaagtgtttctttaggcattgatattatggtacattctctaccataatacttctaatctgactttccttcaggatgatggagttatgaattttcccctttattaaaacgaggcaaggtggtgcatgcctgtaatcatagcacctagtaggcaagggtagaaagatgatgaatttgaagccagtttggccttatataataaagcctcatgtggaaaaaccgtgcaggcaaggctgaggatatagttcagtggtaacgcacttgcttaagtgtgccccaggtctaatacgagaaaacaaagcatttttgttactactggttgttgggcaggcgaggtgacttggtggatgtgagtcttgctttcaaacctgatcactcagttcaatatcttggatccatatagcagaaagtgcaagttgttctatgattcgcattactgtgcgtgtgtgctctctcatgcacacacaggtgtaaataaatgtagtaaatcgaaataaagaaattacatcaaatactggtatttacatttcagaccacagcatttcttagtaaaatttggtgcacaaagaatcaaaaattcctctttagagcatttgaggtctaattctgaataattggattacctaaaaagacagaacagttttttagtctcgatttaaaccaggtgtggtggcacccacctgtaatccagcctttgggaggcagaggcaggatggtcccttagttcaagaccagcctgttgtcctctgcatctggttttacatagtgagtttcaggccagccagagctacagtgagaaccagtcttataaaaagagaacaagcaaatatatgtgtatatattgttgatttagaggttgattttaagtcagagcatactagagttgttaaatacttttaaggcaagggcagtgacgcagaggttaggagcatctgctgctctttttgaagacccaggttcaggtctcaacacccacatggcagcttacagttgtctgtaattccagtgaataagtctaaagaacaataaataataaataaaccagtgtaacatatttaaaagccatagtgacagccacctatcctacttgttaagtgtaaggttacttgtactagaaaagtaagaactacttgggaaatatttttagatcttcacatacccagttacttcacttcaagaaaagagcaattacagcaggaggaactagaacatcacactggaatccctgtcaccagcacttcttccggccttggtttatttattgcgtctcatcgcccaggtgtagcttgttaatttcagagtacacagcagccacaccggtgcagtggtgctcccggaaactccacaccggtgcggtggtgctcccggaaactccatactggtgcagtagtgctccctcaactccctggctccctggagattcagaagttacatcgtatcacgttttctgtttgtgtatctaagaagccctgagagcattttgtcctaaaatggaatattgcccagtatatctgttagtgtcaacactgactgatttttaaagttttaatgatgtacagagtttaatttgttttttaatgcaatatcaatatttcctcaggctctctataaattccttacagaataaagttgattcagtcgg

SEQ ID NO: 195 - DNA, 7321 bp, Homo sapiens
ttttgtagataaatgtgaggattttctctaaatccctcttctgtttgctaaatctcactgtcactgctaaattcagagcagatagagcctgcgcaatggaataaagtcctcaaaattgaaatgtgacattgctctcaacatctcccatctctctggatttctttttgcttcattattcctgctaaccaattcattttcagactttgtacttcagaagcaatgggaaaaatcagcagtcttccaacccaattatttaagtgctgcttttgtgatttcttgaaggtgaagatgcacaccatgtcctcctcgcatctcttctacctggcgctgtgcctgctcaccttcaccagctctgccacggctggaccggagacgctctgcggggctgagctggtggatgctcttcagttcgtgtgtggagacaggggcttttatttcaacaagcccacagggtatggctccagcagtcggagggcgcctcagacaggcatcgtggatgagtgctgcttccggagctgtgatctaaggaggctggagatgtattgcgcacccctcaagcctgccaagtcagctcgctctgtccgtgcccagcgccacaccgacatgcccaagacccagaaggaagtacatttgaagaacgcaagtagagggagtgcaggaaacaagaactacaggatgtaggaagaccctcctgaggagtgaagagtgacatgccaccgcaggatcctttgctctgcacgagttacctgttaaactttggaacacctaccaaaaaataagtttgataacatttaaaagatgggcgtttcccccaatgaaatacacaagtaaacattccaacattgtctttaggagtgatttgcaccttgcaaaaatggtcctggagttggtagattgctgttgatcttttatcaataatgttctatagaaaagaaaaaaaaaatatatatatatatatatcttagtccctgcctctcaagagccacaaatgcatgggtgttgtatagatccagttgcactaaattcctctctgaatcttggctgctggagccattcattcagcaaccttgtctaagtggtttatgaattgtttccttatttgcacttctttctacacaactcgggctgtttgttttacagtgtctgataatcttgttagtctatacccaccacctcccttcataacctttatatttgccgaatttggcctcctcaaaagcagcagcaagtcgtcaagaagcacaccaattctaacccacaagattccatctgtggcatttgtaccaaatataagttggatgcattttattttagacacaaagctttatttttccacatcatgcttacaaaaaagaataatgcaaatagttgcaactttgaggccaatcatttttaggcatatgttttaaacatagaaagtttcttcaactcaaaagagttccttcaaatgatgagttaatgtgcaacctaattagtaactttcctctttttattttttccatatagagcactatgtaaatttagcatatcaattatacaggatatatcaaacagtatgtaaaactctgttttttagtataatggtgctattttgtagtttgttatatgaaagagtctggccaaaacggtaatacgtgaaagcaaaacaataggggaagcctggagccaaagatgacacaaggggaagggtactgaaaacaccatccatttgggaaagaaggcaaagtccccccagttatgccttccaagaggaacttcagacacaaaagtccactgatgcaaattggactggcgagtccagagaggaaactgtggaatggaaaaagcagaaggctaggaattttagcagtcctggtttctttttctcatggaagaaatgaacatctgccagctgtgtcatggactcaccactgtgtgaccttgggcaagtcacttcacctctctgtgcctcagtttcctcatctgcaaaatgggggcaatatgtcatctacctacctcaaaggggtggtataaggtttaaaaagataaagattcagattttttttaccctgggttgctgtaagggtgcaacatcagggcgcttgagttgctgagatgcaaggaattctataaataacccattcatagcatagctagagattggtgaattgaatgctcctgacatctcagttcttgtcagtgaagctatccaaataactggccaactagttgttaaaagctaacagctcaatctcttaaaacacttttcaaaatatgtgggaagcatttgattttcaatttgattttgaattctgcatttggttttatgaatacaaagataagtgaaaagagagaaaggaaaagaaaaaggagaaaaacaaagagatttctaccagtgaaaggggaattaattactctttgttagcactcactgactcttctatgcagttactacatatctagtaaaacctcgtttaatactataaataatattctattcattttgaaaaacacaatgattccttcttttctaggcaatataaggaaagtgatccaaaatttgaaatattaaaataatatctaataaaaagtcacaaagttatcttctttaacaaactttactcttattcttagctgtatatacatttttttaaaagtttgttaaaatatgcttgactagagtttccagttgaaaggcaaaaacttccatcacaacaagaaatttcccatgcctgctcagaagggtagcccctagctctctgtgaatgtgttttatccattcaactgaaaattggtatcaagaaagtccactggttagtgtactagtccatcatagcctagaaaatgatccctatctgcagatcaagattttctcattagaacaatgaattatccagcattcagatctttctagtcaccttagaactttttggttaaaagtacccaggcttgattatttcatgcaaattctatattttacattcttggaaagtctatatgaaaaacaaaaataacatcttcagtttttctcccactgggtcacctcaaggatcagaggccaggaaaaaaaaaaaaaagactccctggatctctgaatatatgcaaaaagaaggccccatttagtggagccagcaatcctgttcagtcaacaagtattttaactctcagtccaacattatttgaattgagcacctcaagcatgcttagcaatgttctaatcactatggacagatgtaaaagaaactatacatcatttttgccctctgcctgttttccagacatacaggttctgtggaataagatactggactcctcttcccaagatggcacttctttttatttcttgtccccagtgtgtaccttttaaaattattccctctcaacaaaactttataggcagtcttctgcagacttaacgtgttttctgtcatagttagatgtgataattctaagagtgtctatgacttatttccttcacttaattctatccacagtcaaaaatcccccaaggaggaaagctgaaagatgcactgccatattatctttcttaactttttccaacacataatcctctccaactggattataaataaattgaaaataactcattataccaattcactattttattttttaatgaattaaaactagaaaacaaattgatgcaaaccctggaagtcagttgattactatatactacagcagaatgactcagatttcatagaaaggagcaaccaaaatgtcacaacccaaaactttacaagctttgcttcagaattagattgctttataattcttgaatgaggcaatttcaagatatttgtaaaagaacagtaaacattggtaagaatgagctttcaactcataggcttatttccaatttaattgaccatactggatacttaggtcaaatttctgttctctcttccccaaataatattaaagtattatttgaactttttaagatgaggcagttcccctgaaaaagttaatgcagctctccatcagaatccactcttctagggatatgaaaatctcttaacacccaccctacatacacagacacacacacacacacacacacacacacacacacacacattcaccctaaggatccaatggaatactgaaaagaaatcacttccttgaaaattttattaaaaaacaaacaaacaaacaaaaagcctgtccacccttgagaatccttcctctccttggaacgtcaatgtttgtgtagatgaaaccatctcatgctctgtggctccagggtttctgttactattttatgcacttgggagaaggcttagaataaaagatgtagcacattttgctttcccatttattgtttggccagctatgccaatgtggtgctattgtttctttaagaaagtacttgactaaaaaaaaaagaaaaaaagaaaaaaaagaaagcatagacatatttttttaaagtataaaaacaacaattctatagatagatggcttaataaaatagcattaggtctatctagccaccaccacctttcaactttttatcactcacaagtagtgtactgttcaccaaattgtgaatttgggggtgcaggggcaggagttggaaattttttaaagttagaaggctccattgttttgttggctctcaaacttagcaaaattagcaatatattatccaatcttctgaacttgatcaagagcatggagaataaacgcgggaaaaaagatcttataggcaaatagaagaatttaaaagataagtaagttccttattgatttttgtgcactctgctctaaaacagatattcagcaagtggagaaaataagaacaaagagaaaaaatacatagatttacctgcaaaaaatagcttctgccaaatcccccttgggtattctttggcatttactggtttatagaagacattctcccttcacccagacatctcaaagagcagtagctctcatgaaaagcaatcactgatctcatttgggaaatgttggaaagtatttccttatgagatgggggttatctactgataaagaaagaatttatgagaaattgttgaaagagatggctaacaatctgtgaagattttttgtttcttgtttttgttttttttttttttttactttatacagtctttatgaatttcttaatgttcaaaatgacttggttcttttcttctttttttatatcagaatgaggaataataagttaaacccacatagactctttaaaactataggctagatagaaatgtatgtttgacttgttgaagctataatcagactatttaaaatgttttgctatttttaatcttaaaagattgtgctaatttattagagcagaacctgtttggctctcctcagaagaaagaatctttccattcaaatcacatggctttccaccaatattttcaaaagataaatctgatttatgcaatggcatcatttattttaaaacagaagaattgtgaaagtttatgcccctcccttgcaaagaccataaagtccagatctggtaggggggcaacaacaaaaggaaaatgttgttgattcttggttttggattttgttttgttttcaatgctagtgtttaatcctgtagtacatatttgcttattgctattttaatattttataagaccttcctgttaggtattagaaagtgatacatagatatcttttttgtgtaatttctatttaaaaaagagagaagactgtcagaagctttaagtgcatatggtacaggataaagatatcaatttaaataaccaattcctatctggaacaatgcttttgttttttaaagaaacctctcacagataagacagaggcccaggggatttttgaagctgtctttattctgcccccatcccaacccagcccttattattttagtatctgcctcagaattttatagagggctgaccaagctgaaactctagaattaaaggaacctcactgaaaacatatatttcacgtgttccctctttttttttttcctttttgtgagatggggtctcgcactgtcccccaggctggagtgcagtggcatgatctcggctcactgcaacctccacctcctgggtttaagcgattctcctgcctcagcctcctgagtagctgggattacaggcacccaccactatgcccggctaattttttggatttttaatagagacggggttttaccatgttggccaggttggtctcaaactcctgaccttgtgatttgcccgcctcagcctcccaaattgctgggattacaggcatgagccaccacaccctgcccatgtgttccctcttaatgtatgattacatggatcttaaacatgatccttctctcctcattcttcaactatctttgatggggtctttcaaggggaaaaaaatccaagcttttttaaagtaaaaaaaaaaaaagagaggacacaaaaccaaatgttactgctcaactgaaatatgagttaagatggagacagagtttctcctaataaccggagctgaattacctttcactttcaaaaacatgaccttccacaatccttagaatctgcctttttttatattactgaggcctaaaagtaaacattactcattttattttgcccaaaatgcactgatgtaaagtaggaaaaataaaaacagagctctaaaatccctttcaagccacccattgaccccactcaccaactcatagcaaagtcacttctgttaatcccttaatctgattttgtttggatatttatcttgtacccgctgctaaacacactgcaggagggactctgaaacctcaagctgtctacttacatcttttatctgtgtctgtgtatcatgaaaatgtctattcaaaatatcaaaacctttcaaatatcacgcagcttatattcagtttacataaaggccccaaataccatgtcagatctttttggtaaaagagttaatgaactatgagaattgggattacatcatgtattttgcctcatgtatttttatcacacttataggccaagtgtgataaataaacttacagacactgaattaatttcccctgctactttgaaaccagaaaataatgactggccattcgttacatctgtcttagttgaaaagcatattttttattaaattaattctgattgtatttgaaattattattcaattcacttatggcagaggaatatcaatcctaatgacttctaaaaatgtaactaattgaatcattatcttacatttactgtttaataagcatattttgaaaatgtatggctagagtgtcataataaaatggtatatctttctttagtaattacattaaaattagtcatgtttgattaattagttc

SEQ ID NO: 196 - DNA, 2727 bp, Homo sapiens
ggacgtcgcttccggagcagcatggcggccactgaggatgagaggctagcagggagcggtgagggagagcggctggatttcttacgggatcggcacgtgcgatttttccagcgctgcctccaggttttgccggagcgctattcttcactcgagacaagcaggttgacaattgcattttttgcactctccgggctggatatgttggattccttagatgtggtgaacaaagatgatataatagagtggatttattccctgcaggtccttcccacagaagacagatcaaatctaaatcgctgtggtttccgaggctcttcatacctgggtattccgttcaatccatcaaaggctcctggaacagctcatccttatgatagtggccacattgcaatgacctacactggcctctcatgcttagttattcttggagacgacttaagccgagtaaataaagaagcttgcttagcgggcttgagagcccttcagctggaagatgggagtttttgtgcagtacctgaaggcagtgaaaatgacatgcgatttgtgtactgtgcttcctgtatttgctatatgctcaacaactggtcaggcatggatatgaaaaaagccatcacctatattagaaggagtatgtcctatgacaatggactggcacagggagctggacttgaatctcatggaggatcaactttttgtggcattgcctcactatgtctgatgggtaaactagaagaagttttttcagaaaaagaattgaacaggataaagaggtggtgtataatgaggcaacaaaatggttatcatggaagacctaataagcctgtagacacctgttattctttttgggtgggagcaactctgaagcttctaaaaattttccaatacactaactttgagaaaaatagaaattacatcttatcaactcaagatcgccttgtagggggatttgccaagtggccagacagtcatccagatgctttgcatgcatactttgggatctgtggcctgtcactaatggaggaaagtggaatttgtaaagttcatcctgctctgaatgtaagcacacggacttctgaacgccttctagatctccatcaaagctggaaaaccaaggactctaaacaatgctcagagaatgtacatatctccacatgactgattttagattgggagggtggggggatttgtagcataactgtagctcaagtttaaaagccatgtataaccaagtgtgctctttttttaaaaggtagagtcttacaatcaaatctcctgctgatttcactttgggatatggtcttgagccagtaatctttatactgggtttcaagaaaatctttgttgaagtttgaaccacaactttgtcgtggttcttaaatgtttatactgtatttctaagaagttgtttgaggcaaattaactgtatgtgtgtaggttatctttttaaaaactcttcagtgcaaattgtatcttattataaaatggacacaaattttcaagtttacacttcatatagcattgataatcttcaggtgaacacttagtgatcatttaaaaagctcactgctgatcgtagaaaatttgctttaattaattaagtatctgggattattctttgaaaacagatgaccataattttttttaaagaagagtgacttattttgtcttattcttaagtaaagtgtgccaattaaacctgtgtggcctatataaatgaagttaataacttcatagtaagaataaataggtttaactaatgtgatagttttctaaaaggagattgtttgaagacaactattatgtaactgagggaaaagcaacttaactgtatgtgattgtgaatgagaaagttttgtgctatgtgggtcatttatctagacattgctgtggtgaataccagttatgtttgattttattctcaaatcattagttgcctttttttttttttttttttttttgctttctaggaagaaaacaatcttttttatctagaaggaaagatactttgtgttttcatttttagccatttgaagtttttaatttattgcccccagtgtgttagctgctctaatttcaaactaatacttttctaatttttttcaaattaaataagtaaaaaatacaaaaacagaaccattcaaacagattcagtggtgtaactcaatacatggtcatttttattctcatattttcaggtaagtgaaagggaaatgcgaccatttagagggtaagaaatagggttttgtttttgttcattgttttgttttaagtctatgaactagctaattataaaggaggtagtataaaaactcttcattagtaattaatttatcaataactcatatccgttacttgctcagtgacattcagaactattgcgtctagtactgaaatggggaaagaaatctcttcactaaaggagttggctttaagttagtcttggtgataataaatgttgaaatacaagtatcagtataaaaactggattactggtatcactgtttaggcattgtaatactttaaatgttatctttttttctaaatcagagggaaaaaaatgttgtgaaataacagtccttcccaagggaaacactgtgtacttggagaaatgattgatttattattggcatgcttagttttaaacctgagtttgccaactgtatgttttttaattagaaataaaataaatcttctgatggtgggggaaaaagtaagcttaataacaga

SEQ ID NO: 197 - DNA, 6061 bp, Homo sapiens
atggcgcaccgggggccctcgcgcgcctcgaagggccccggccccaccgcccgagccccgagccccggggctccgccgccgccgcgctcgccgcgctcgcggccgctcctgctgctgctgctgctgctgggcgcctgcggggcggcggggcgctcccctgagcccgggcgcctgggtcctcacgcccaactgacccgggtgccgcggagccctcccgcggggcgcgcggagcccggtggcggcgaggaccggcaggcgcgcggcacggagccaggcgccccgggtccgagtcccggtcccgctcctggtcccggcgaggacggcgcccccgccgcgggctaccggcgctgggagcgggcggcgccgctggccggagtggcttcgcgggcgcaggtctcgctcatcagcacgtcgttcgtgctcaagggggacgcgacgcacaaccaggcgatggtgcactggacgggcgagaacagcagcgtgatcttgatcctgacgaagtactaccacgcagacatggggaaggttctggaaagttctctgtggcggtcatcagatttcgggacgtcctacaccaagctcaccctccagcctggtgtcaccaccgtcatcgacaatttctacatctgcccgaccaacaagaggaaggtcatccttgtcagctcctcactcagtgaccgggaccagagcctattcctcagcgcagacgaaggcgccacctttcagaagcagcccattcccttcttcgtggaaactctgattttccaccctaaggaggaggacaaggtcctcgcctacacaaaggagagcaagctctacgtgtcatctgacttggggaaaaagtggacacttctgcaagagcgagtgaccaaagaccacgtgttctggtctgtgtctggggtggacgctgaccctgacttggtccacgtggaagcccaagacctcggtggagattttcggtacgtcacctgcgcaatccacaattgctccgagaagatgctgacagccccattcgcaggccccattgaccacgggtctctgaccgtgcaggacgattacatcttctttaaggcaacatcagcaaaccagacaaaatactacgtctcttatcgtcgaaatgaatttgtcctgatgaagctgccgaagtatgcattgccaaaggatctgcagatcatcagcacggacgagagtcaggtgttcgtggcggtgcaggagtggtaccagatggacacctacaacctgtaccagtcggacccacggggcgtgcgctacgcgctggtgctgcaggacgtgcgcagctcacggcaggcggaggagagcgtgctcatcgacatcctggaggtcagaggggtgaaaggagtcttcctggcaaaccaaaaaattgatgggaaagtgatgacgcttataacctacaacaagggccgcgactgggattacctgaggccacccagcatggacatgaatggaaaaccaaccaactgcaagcctccagactgccacctgcacctgcacctgcgctgggcagacaacccctacgtatcaggcaccgtgcacaccaaggacaccgccccaggcctcatcatgggtgcaggtaacctgggctcacagctggtggaatataaagaagaaatgtacatcacgtcagactgtggtcacacctggcggcaggtgtttgaggaagagcatcacatcctgtacctggaccacggcggcgtgatcgtggccatcaaagacacctccatccctttgaagatcctcaagttcagtgtggacgagggcctcacctggagcacgcacaacttcaccagcacctcggtgtttgtggacgggctgctgagtgagccaggggacgagacgctggtcatgacggtctttggccacatcagcttccgctccgattgggagctggtcaaggtggacttccggccctcattctccaggcagtgcggcgaggaggactacagctcctgggagctctccaacctgcagggcgaccgctgtatcatgggccagcagagaagtttccggaaaagaaagtccacgtcctggtgcatcaaggggaggagcttcacgtcggcgctcacgtcccgcgtgtgcgagtgccgggactcggacttcctgtgcgactacggatttgagcgctcctcctcctcagagtccagcaccaacaagtgctctgccaacttctggtttaacccattgtccccgcctgacgactgtgccctgggccagacctacaccagcagccttgggtaccggaaagtggtgtccaacgtgtgtgagggtggggtggacatgcagcagagtcaggtgcagctgcagtgccccctcacgccgccccggggcctgcaggtcagcattcaaggcgaggcggtggccgtgcggcctggagaggacgtcctgtttgtggtgcggcaggagcagggtgatgtcctgactaccaagtaccaggtagaccttggggacggcttcaaggccatgtacgtgaaccttacactgaccggggagcccatccggcaccgctacgagagccccggcatctaccgcgtgtccgtcagggcagagaacacggcaggccacgatgaggcggtgctctttgtccaggtcaactcccccctgcaggccctctacctggaggtggttcctgtcattggcctcaaccaggaggtgaacctcacagctgtgctgcttcccttgaaccctaacctcaccgtcttctactggtggatcggccacagcctgcagcccctcctttccctggataattctgtgacaacgcggttttcggacacgggcgacgtgcgtgtgacggtgcaggccgcctgtgggaactcggtgctgcaggactccagggtcctccgtgtgctggatcaatttcaagtcatgcctctgcagttttccaaggagctggatgcctacaaccccaacacccctgagtggagggaagacgtgggcctggtggtcacccggctgctctccaaggagaccagcgtccctcaggagcttctggtgactgtggtgaagccggggctgcccactttggccgatctgtacgtgctcctgccccctcccaggcccacaaggaagaggagcctctcgagtgataagaggctcgccgccatccagcaggtgctgaacgcacagaagatcagcttcctcctgcgaggcggagtccgggtcctggtggccctgcgggacacaggcacaggtgctgagcagctgggcggcggtggcggctactgggcggtagtggtgctgtttgtcatcgggctcttcgcagcgggagccttcatcctctacaagttcaaaaggaaacggccaggcaggaccgtgtacgcccaaatgcacaacgagaaggagcaggagatgaccagccctgtgagtcacagtgaggacgtccagggcgctgtccagggcaaccactcaggcgtggtcctgagcatcaactcccgagagatgcacagctacctggtgagctgatgccaccccagcatctgtcttttcacccacggagggcacagaaccaccagcaaagccggcggctggactggcgcccctcagagacctgcggaaagccccctccctgagtcgtcgccacaccaggcgacaggcaccaccccctctgataaatccaagcccgcccaggcccacggggggcccacgggaccccccgggactccccggacatggccctgcccctatgggacaccaggcctgactcaggcaggttctgccccccagaccccacacacggccgccccacgtgctgtcgctcagcccgaggcctgacttctctgggctgaggctggtcgtcctggagccctcccagtacctcgggctgcaagagctgcagacccgttcagacactgcgttgcgggctccttccccgcagaggccggggcctccctgactttgcttcttcactcccacctgtgcggccacccagtccctctgtgggagcccgggtgccaggccctcccaacaccacaccaccctccaggcccccctgccctccggctggaaactgcagctctgtaaatgcctctctaggtagctgctggcggtggtgggggtgtctcactctctgtctttatagccggcggtagccaccggggtggctctgtcagagttccgtactcgggagcccctttccctgagtgcccagggtgtctcctctgcccagaggggcagcagctctccctggttctccccagggcagacggggtagggcgggctcaggacccagtgcccatggttcctcactcctaccagcaagcagcaccatcccgcaggcttctcccacctgatggctgttctcccaccgggtctgggctctggaaggagccagatgcccccagaaaggtgggtggtggagacggcaccagatgtaccagttttctgcagttccttataggcgaagggaaccgggtggaaaccaagctgggagaggctgaggatggcagggctggaagggccatcagcgtgaccctcattttcaagaaggggaaactgaggcccagggaggagagtaactgaaggtcacagcacggtcacagcagaggtggccgaacccagccctctgcgcgccagtgctgtgcggtctccacacccttacggtttcctagaatcagggatgttagtgtaagtctataggaatataggggggtgggggggtcaccttttgccttgaaatgggaagtcagtagccccttcctcctcctccctcctccccctcctctctggcagggatctcagatgaccgtggcctccctctcagagggggagaacgccagagccctggctggtgatgtgctggctgggggtgaatcccaatgagggtccctctcagagcgggagaacgccagagccctggatggtgatgcgctggctgggggtgaatcccaatgagggtccctctcagaaagggagaacgccagagccctggctggtgacatgctggctgggggtgaatccgaatgacagtgcagacgttctcccatccaccatgtctgagcttgggggaattgcctcatttcccctggaaaagaaacatggtccattagaggggaaagcccaggggtgaatcttcacgccccaaacagtgcccggtggggaggaggcacccgctccttgttgagtaaaaccacccatggagactggaacctcatctccctgggtcggggggtgttcaaggccacaggacaaggggagcaccctgggccacacaggcgtggaggtgtccccaccccttccacctgtcccccagacccaaagctctctccccaccctacctgcccacctggggctcctgtgccccctccccactccagaggccaccctacaagttgtcctcaaggtcatcctggagatgggatccaggacgtggggccatgactctctgggaccttgccacagcccccattcccctgcttgcagtctgcaaggacacctttgcagggattcttgtcctgctggccaccccacccacacctgtccctggccagcaggccgcctgcaagcgtcaggcacacagggacagacatggcgagcacagtgcaggcccggggcccacgggcaacatggaaccctgggaactgccctcccccttagctcacagtgcctgcggtagccactctaggtcgttggccttccttgaccactccatttaattctctctgctgtttgggttgggtttttccccttagttatctgtgggtttcctgtattttatgttaatatttctattaagaacatgttgggcatgtggacccaagcacctgggaaggaggtggcatctgagacagcctgatacgttcccgtctgtgcacccatggagatccaggcgtgggcccgtgtctgtccctggttgtaaattcgagggtctgcatatctgatgttcaggtagacctgggcgcctgggaacgaggccatcagctgccatgcacataacaaagagacaatgcattccttcttatttttcctttttaaaaatcgatgaatcatttgtgatgcttttaacaaagattaaatgaatttgatcagcttttgccttaaaaaaaaa

SEQ ID NO: 198 - DNA, 2805 bp, Homo sapiens
ctccttgcacgggccggcccagcttccccgcccctggcgtccgctccctcccgctcgcagcttacttaacctggcccgggcggcggaggcgctctcacttccctggagccgcccgcttgcccgtcggtcgctagctcgctcggtgcgcgtcgtcccgctccatggcgctcttcgtgcggctgctggctctcgccctggctctggccctgggccccgccgcgaccctggcgggtcccgccaagtcgccctaccagctggtgctgcagcacagcaggctccggggccgccagcacggccccaacgtgtgtgctgtgcagaaggttattggcactaataggaagtacttcaccaactgcaagcagtggtaccaaaggaaaatctgtggcaaatcaacagtcatcagctacgagtgctgtcctggatatgaaaaggtccctggggagaagggctgtccagcagccctaccactctcaaacctttacgagaccctgggagtcgttggatccaccaccactcagctgtacacggaccgcacggagaagctgaggcctgagatggaggggcccggcagcttcaccatcttcgcccctagcaacgaggcctgggcctccttgccagctgaagtgctggactccctggtcagcaatgtcaacattgagctgctcaatgccctccgctaccatatggtgggcaggcgagtcctgactgatgagctgaaacacggcatgaccctcacctctatgtaccagaattccaacatccagatccaccactatcctaatgggattgtaactgtgaactgtgcccggctgctgaaagccgaccaccatgcaaccaacggggtggtgcacctcatcgataaggtcatctccaccatcaccaacaacatccagcagatcattgagatcgaggacacctttgagacccttcgggctgctgtggctgcatcagggctcaacacgatgcttgaaggtaacggccagtacacgcttttggccccgaccaatgaggccttcgagaagatccctagtgagactttgaaccgtatcctgggcgacccagaagccctgagagacctgctgaacaaccacatcttgaagtcagctatgtgtgctgaagccatcgttgcggggctgtctgtagagaccctggagggcacgacactggaggtgggctgcagcggggacatgctcactatcaacgggaaggcgatcatctccaataaagacatcctagccaccaacggggtgatccactacattgatgagctactcatcccagactcagccaagacactatttgaattggctgcagagtctgatgtgtccacagccattgaccttttcagacaagccggcctcggcaatcatctctctggaagtgagcggttgaccctcctggctcccctgaattctgtattcaaagatggaacccctccaattgatgcccatacaaggaatttgcttcggaaccacataattaaagaccagctggcctctaagtatctgtaccatggacagaccctggaaactctgggcggcaaaaaactgagagtttttgtttatcgtaatagcctctgcattgagaacagctgcatcgcggcccacgacaagagggggaggtacgggaccctgttcacgatggaccgggtgctgacccccccaatggggactgtcatggatgtcctgaagggagacaatcgctttagcatgctggtagctgccatccagtctgcaggactgacggagaccctcaaccgggaaggagtctacacagtctttgctcccacaaatgaagccttccgagccctgccaccaagagaacggagcagactcttgggagatgccaaggaacttgccaacatcctgaaataccacattggtgatgaaatcctggttagcggaggcatcggggccctggtgcggctaaagtctctccaaggtgacaagctggaagtcagcttgaaaaacaatgtggtgagtgtcaacaaggagcctgttgccgagcctgacatcatggccacaaatggcgtggtccatgtcatcaccaatgttctgcagcctccagccaacagacctcaggaaagaggggatgaacttgcagactctgcgcttgagatcttcaaacaagcatcagcgttttccagggcttcccagaggtctgtgcgactagcccctgtctatcaaaagttattagagaggatgaagcattagcttgaagcactacaggaggaatgcaccacggcagctctccgccaatttctctcagatttccacagagactgtttgaatgttttcaaaaccaagtatcacactttaatgtacatgggccgcaccataatgagatgtgagccttgtgcatgtgggggaggagggagagagatgtactttttaaatcatgttccccctaaacatggctgttaacccactgcatgcagaaacttggatgtcactgcctgacattcacttccagagaggacctatcccaaatgtggaattgactgcctatgccaagtccctggaaaaggagcttcagtattgtggggctcataaaacatgaatcaagcaatccagcctcatgggaagtcctggcacagtttttgtaaagcccttgcacagctggagaaatggcatcattataagctatgagttgaaatgttctgtcaaatgtgtctcacatctacacgtggcttggaggcttttatggggccctgtccaggtagaaaagaaatggtatgtagagcttagatttccctattgtgacagagccatggtgtgtttgtaataataaaaccaaagaaacata

SEQ ID NO: 199 - DNA, 2233 bp, Homo sapiens
ccagggagacctcatcttccaaccaagcttgctgggctagctttaatcaatgctggcctgagaacaggagcggaacattgcctagtagaccctgaggctttacaacagtgccactgacccctatgagcctgatgctggatgaccaaccccctatggaggcccagtatgcagaggagggcccaggacctgggatcttcagagcagagcctggagaccagcagcatcccatttctcaggcagtgtgctggcgttccatgcgacgtggctgtgcagtgctgggagccctggggctgctggccggtgcaggtgttggctcatggctcctagtgctgtatctgtgtcctgctgcctctcagcccatttccgggaccttgcaggatgaggagataactttgagctgctcagaggccagcgctgaggaagctctgctccctgcacttcccaaaacagtatctttcagaataaacagcgaagacttcttgctggaagcgcaagtgagggatcagccacgctggctcctggtctgccatgagggctggagccccgccctggggctgcagatctgctggagccttgggcatctcagactcactcaccacaagggagtaaacctcactgacatcaaactcaacagttcccaggagtttgctcagctctctcctagactgggaggcttcctggaggaggcgtggcagcccaggaacaactgcacttctggtcaagttgtttccctcagatgctctgagtgtggagcgaggcccctggcttcccggatagttggtgggcagtctgtggctcctgggcgctggccgtggcaggccagcgtggccctgggcttccggcacacgtgtgggggctctgtgctagcgccacgctgggtggtgactgctgcacattgtatgcacagtttcaggctggcccgcctgtccagctggcgggttcatgcggggctggtcagccacagtgccgtcaggccccaccaaggggctctggtggagaggattatcccacaccccctctacagtgcccagaatcatgactacgacgtcgccctcctgaggctccagaccgctctcaacttctcagacactgtgggcgctgtgtgcctgccggccaaggaacagcattttccgaagggctcgcggtgctgggtgtctggctggggccacacccaccctagccatacttacagctcggatatgctccaggacacggtggtgcccttgttcagcactcagctctgcaacagctcttgcgtgtacagcggagccctcaccccccgcatgctttgcgctggctacctggacggaagggctgatgcatgccagggagatagcgggggccccctagtgtgcccagatggggacacatggcgcctagtgggggtggtcagctgggggcgtggctgcgcagagcccaatcacccaggtgtctacgccaaggtagctgagtttctggactggatccatgacactgctcaggactccctcctctgagtcctgctgtttcctccagtctcactgcacaccactgcctcatgcttcctggggcctccagcagctccactaatggaggagaggcagtagcctccgacacagaacgcatggacctcctactactgtgtgtgaggaacagtcactacccactggccagccacccagccaacaggtctctcctcttgggccctgatttcagagtcctctttctcactagagactcaatgacagaagagaggctgggacttggttgggcatgctgtggttgctgagggatgagggggaggagagaggtaggagctggagatgaagaggctgctagaagcagcaggaagcctgcccttctgccctctcccctccctgcccctgtgtgagtcttttgggagggtgctgggaggtgccccccgtcccacctttttcctgtgctctaggtgggctaagtgcctccctagaggactccatggctgagaggctcctgggcagatggggtcaaggctgggccagcccagatgaagcctatgggagtcaggaccctctccactctccctctccactccccttcctgttctcacctggctgtggctggccctgtgtggggtgggtacactggaaaacaagaaggttggagttggtctaggacattggttttaaatgacagttctgtgaactggtccaaggagttctgttattaaagtgatatatggtcttggtccaaaaaaaaaaaaaaaaaaaaaaaa

SEQ ID NO: 200 - DNA, 7689 bp, Homo sapiens
acccgcccccaccccctccagcatctcgggccagacagagaaaaccttgttcaagtttgcagcaagtactttcccggtgcgcaaaactgggcgactgggaacgcgttgagacgttcctctttcccgcttctccacctttacgcctgaaagaagactcccaaagattgctttcttctgggacgctgcttggacgctaaccgcgttgattggaacagattttgtgtcttggctggctttgggtgaagaccggggagaaaaggttgcgctgcgattctcaagatctctggacctggattatcattgcaaatccattaaagaaggagaagcaagcggatttcagagaggttgttcttcagaaaaaaatggttatttctttgaactcatgcctgagctttatttgtttattgttatgccactggattgggacagcatcacctctgaatcttgaagaccctaatgtgtgtagccactgggaaagctactcagtgactgtgcaagagtcatacccacatccctttgatcaaatttactacacgagctgcactgacattctaaactggtttaaatgcacgcggcacagagtcagctatcggacagcctatcgacatggggagaagactatgtataggcgcaagtctcagtgttgtcctggattttatgaaagcggggaaatgtgtgtcccccactgtgctgataaatgtgtccatggtcgctgtattgctccaaacacctgtcagtgtgagcctggctggggagggaccaactgctccagtgcctgcgatggtgatcactggggtccccactgcaccagccggtgccagtgcaaaaatggggctctgtgcaaccccatcaccggggcttgccactgtgctgcgggcttccggggctggcgctgcgaggaccgctgtgagcagggcacctatggtaacgactgtcatcagagatgccagtgccagaatggagccacctgcgaccacgtcacgggggaatgccgctgcccaccaggatacaccggagccttctgtgaggatctttgtcctcctggtaaacatggtccacagtgtgagcagagatgcccttgtcaaaatggaggagtgtgtcatcacgtcactggagaatgctcttgcccttctggctggatgggcacagtgtgtggtcagccttgccccgagggtcgctttggaaagaactgttcccaagaatgccagtgccataatggagggacgtgtgatgctgccacaggccaatgtcattgcagtccaggatacacaggggaacggtgccaggatgagtgtcctgttgggacctatggcgttctctgtgctgagacctgccagtgtgtcaacggagggaagtgttaccacgtgagcggcgcatgcctctgtgaagcaggctttgctggcgagcgctgcgaagcacgcctgtgtcctgaggggctctacggcatcaaatgtgacaaacggtgtccctgccacctggaaaacactcatagctgtcaccccatgtctggagagtgtgcctgcaagccgggctggtcaggactctactgtaatgagacatgttctcctggattctacggggaagcttgccagcagatctgcagctgccaaaatggggcagactgtgacagtgtgactggaaagtgcacctgtgccccaggattcaaaggaattgactgctctaccccatgccctctgggaacctatgggataaactgttcctctcgctgtggctgtaaaaatgatgcagtctgctctcctgtggacgggtcttgtacttgcaaggcaggctggcacggggtggactgctccatcagatgtcccagtggcacatggggctttggctgtaacttaacatgccagtgcctcaacgggggagcctgcaacaccctggacgggacctgcacgtgtgcacctggatggcgcggggagaaatgcgaacttccctgccaggatggcacgtacgggctgaactgtgctgagcgctgcgactgcagccacgcagatggctgccaccctaccacgggccattgccgctgcctccccggatggtcaggtgtccactgtgacagcgtgtgtgctgagggacgctggggccccaactgctccctgccctgctactgtaaaaatggggcttcatgctcccctgatgatggcatctgcgagtgtgcaccaggcttccgaggcaccacttgtcagaggatctgctcccctggtttttatgggcatcgctgcagccagacatgcccacagtgcgttcacagcagcgggccctgccaccacatcaccggcctgtgtgactgcttgcctggcttcacaggcgccctctgcaatgaagtgtgtcccagtggcagatttgggaaaaactgtgcaggaatttgtacctgcaccaacaacggaacctgtaaccccattgacagatcttgtcagtgttaccccggttggattggcagtgactgctctcaaccatgtccacctgcccactggggcccaaactgcatccacacgtgcaactgccataatggagctttctgcagcgcctacgatggggaatgtaaatgcactcctggctggacagggctctactgcactcagagatgtcctctagggttttatggaaaagattgtgcactgatatgccaatgtcaaaacggagctgactgcgaccacatttctgggcagtgtacttgccgcactggattcatgggacggcactgtgagcagaagtgcccttcaggaacatatggctatggctgtcgccagatatgtgattgtctgaacaactccacctgcgaccacatcactgggacctgttactgcagccccggatggaagggagcgagatgtgatcaagctggtgttatcatagttggaaatctgaacagcttaagccgaaccagtactgctctccctgctgattcctaccagatcggggccattgcaggcatcatcattcttgtcctagttgttctcttcctactggcattgttcattatttatagacacaagcagaagggaaaggaatcaagcatgccagcagttacctacacccctgctatgagggtcgtcaatgcagattataccatttcaggaacccttcctcacagcaatggtggaaacgctaatagccactacttcaccaatcccagttaccacacgctcacccagtgtgccacatcccctcacgtcaacaacagggacaggatgactgtcacgaagtcaaaaaacaatcaactgtttgtgaatcttaaaaatgtgaaccctgggaagagaggccctgtgggggactgcactgggacattgccggctgactggaaacatggcggctacctcaacgagctcggtgcttttggacttgacagaagctatatgggaaaatccttaaaagacctgggaaagaattctgaatataattcaagtaactgctccctaagcagttctgagaacccatatgccactattaaagacccacctgtacttatcccgaaaagctcagagtgtggttatgtggagatgaaatcgccggcacgaagagattccccatatgcagagatcaataactcaacttcagccaacaggaatgtctatgaagttgaacctacagtgagtgttgtccaaggagtattcagcaataatgggcgtctctcccaggatccatatgacctcccaaagaacagtcacatcccttgtcattatgacctgctgccagtccgagacagttcatcctcccctaagcaagaggacagtggtggtagcagcagcaacagcagcagcagcagtgaatgacaccaaaggaccgcttggtagccactggaaccctttccagaactgctgtttggttcttctccatcctcaattttgccactttcatgtgaatgttagtcaattcggtgggcaatttttggacatgaaccagaaagctgaaagctgaggctgacacggactgtaggtgctttttgttcaggtggattcgaaggagttagagatgtgatttcccattgctgttagttttagaactatacccgtgaagcatgacttattgtaagatgttggctgaaagcatgaacttgcagaactccctcggagacgcaggttgcagtggacattgggattgttgcttgaaaaattaaaatttgaatattttctctctcatttgcatcatacagctctacctaggattgtacagtttaccataaaatttacttcatgaaagtgggaatcactgaacatgtagaagacaaggaacatattgttaactcctgattcttaactttattcaactggactcagaattgtagggataatatgaatgcaggaggaaacattctgtcaggcggtatgactggacagactttgaatatactctaaaagtggacagaaaatttacgaaaatcttagattttgtttagaatgagaaaatatacaattagaattattttagaaatagtaggaagtattgcagaagtcaatacacaaatgtgccaggcagaggtggttttctctgtttgactctcaaccaacttcagatctatgacattattctgatcactggctccatcatacatattcaccacttgagattcataacatatcaatagttatttcataaatatagaaatgaaataattttatttttgacagactggatggaatgagtgtgtaatgattgataaaggttgtaaattttaaatgcaagatgacgcttacgttctgtaaaccattagtaatacatgctgtaatatagaattagtggaacattttgattaatctttccctagaagtgactgaaatatttttgtgcatatttgagaaagggaactttccttttattaattgtcaatttagagaaactatgcttaagctggtcttttgcattgctaatgtgacatgtacccaacttttcattaatttgtatttccatttttaaattgcatattctatgttttgtagtgtttggattgttaatgaaaaaatattatatgttcgttattccttgtattattgccacttatcttttgcttgataaaaatgcgttgttcttttttcttttggagggacaagatgaaaatatataatttgaattgattaaaattggtcgttactaaaatagtatagtaaccacaagtgattggcttataaatgaagtagaaatgctttttaatattccaaaatagagttccttttgatctgttggtgctgagccttggttaaaccagggagaaggggagcagaaaggaaacgttgttactgatgagtaccacagactcatcttaaaaaaaactctcattatggtgatcatagaattgaccatccaaactgggacactcttgagagtaaatggagggcattattaataattatcttgtaatgaacttaaatctggactgttccaggcaaaccagacttatcttgcaatatgagaatgctgacacaatgcaggaaagccagtttcccttttgttgatctacttgaccaagcaaaggggctgaaaaactgaataaggaaacaactttataagagaaacagtggtcttcaatcttttaaagacatgaaatcctatatggcattctgtctcagtgagtcagttaacaaatacgtatgtgcaacccttctgctagtagtgcacataagtgattatccctgccaggtatcgagttggaatatccagttatttcatgtcacacatcggcacgtatgatggtggtttggtcagatggataatacagcagacacacttagaacactcactgcactggtggctgttcattttgaggaactccaaagtcaattcaaggaaataaggaatgacctggaacaggccttagaaacaattgatttattccaatagttaaccactggctggctcccaactctaggtgataggcatctaattgagacatgtgtgagtcaatagccatcggggtcctttttggtgagaagaaataagacattttctcccttttaaagatcatctcttcagagctgcatggtaaatttgaatttccccattgttctctagagctaggtcaaaaaaacaactgtttcttttcttattccactattaataaattgaaagcttgctgtacaaaggcaacagcaacttaaaaaagaaaatctggacaatagatgtggactccaaggggccactgccatcccttcctgtgtgctctttttgacaagtaaatcactccagttagctgatgtcctgaaatgacatttgtacctgaggcaattcttattagagcttactcaggacttttcaaacatcaggacacacatagcaatttggatgttgtaaaactacgtgttacatttggagaggtcttgttgagaaggcaaaattttctaaatattttgatatcaatttgggtaaagaaaggaatacttttgttagaatgagaattaaagagaaaacaaaagaatcttggcaaaattttccctctgaaattacaaactttaggaacttttccagatgtatcgaatttaatttgacattgatgtcactcttcataccaagtgaatctattctcatgaactttgaacccatgttaattttggaccctataactaatttcctttctgtatcccatggtggtcaaagcagtaaaggagtttagagatacttagcaaatgccattcatatagtattgttagccaaactattattccttccttagaagttgatgtatcagaaaatttataagttatttgtatttatatataagtacatcagaacttgcccacatgataactcatgtttgctttaataaggaaaatatgttatttgaggttaattatatgatagtgaggaacattttacaattatttacagtgtttgacattaattgctgtcctatgatacagtagtaatgttaacagagagtttaatatgtttagcattatctttatggaatttatattcaccaatttcaggaaaaccaaccatagaactttataataggacagttataacctgactgaaccaaatccatcagcataatgactgtgtgttctgagaaatgcaaacaactttatgaaagtgtggtcatcttgacccccaaagagccacagtagctgtcaattattgagatttttaaatggtaaatattgcaaaagttaaacaagggtaccacaatatcatttataattgatgtcaatattagtagtccactttatgcttaaaataaaatcataaaaaatcaagttttaaggttatattttttaaaataatgaattttctatctctaggcaacatgtctttattattcaagctgaatgtttaagagagattttggtcttaaaggcttcacatcatgaaagtgtacatgcatatgcaagtgtgaattacgtggtatggatgtttgcttgtttattaactaaagatgtacagcaaactgcccgtttagagtcctgttaatattgatgtcctaacactgggtctgcttatgctagttcagtatttggtctaggcttcattttgatatgactgaattgcaatctatatttttaaaaagaaaaatcaaaatacattagggtttacttggttgtggcaaacaaacaaaaaatgctttcagtgttgaaatatctctattttccaaagatgataaactttcatcgttcttagcctacattgtcatttatatcaccaaatgagtttatagattaatgcaataaactttctaataaaaaa

SEQ ID NO: 201 - DNA, 2379 bp, Homo sapiens
cacctggcgcacctgtccttttttcttctatttttcagaaccctgggcggaaagcgcgagcgagttgggcagatgccggcggccgcggtgcaggaagcggtcggcgtgtgctcctacgggatgcagctcagctgggacatcaacgatccgcagatgcctcaggagctggccctctttgaccaattccgagagtggcctgacggctatgtgcgcttcatctacagcagcgatgagaagaaggcacagcgtcacctgagcggctgggccatgcgcaacaccaacaaccacaatggccacatcctcaagaagtcgtgcctgggtgtggtggtgtgtacacaggcctgcaccctgcccgacggttcccgcctgcagctgaggccggccatctgcgacaaggcacggctgaaacagcagaagaaggcatgccctaactgtcattctgctttggagttgattccttgtcgagggcacagcggataccccgtaaccaacttttggcggcttgatggcaacgcgatcttttttcaggccaagggagttcatgatcatccaagaccagagagcaaatcagagacagaagctagaagaagcgccatcaagagacaaatggcctctttctaccaaccccagaaaaagagaattcgagaatccgaggcagaagaaaatcaagacagcagtggtcatttcagcaacatacctcccttggaaaatccagaagactttgatatagttactgaaaccagcttccctattccagggcagccttgcccttccttcccaaagtctgatgtttacaaagctacctgtgacctagccacctttcaaggagacaaaatgccacccttccagaaatactcaagcccaagaatctatttgcctaggccaccttgcagctatgaattggcaaaccctggttatacaaattcaagcccatatcccaccctttataaggattccaccagtatccctaatgacacagactgggttcatctgaacacactacaatgtaatgtcaattcatacagcagctatgagagaagctttgatttcaccaacaaacagcatggctggaaaccagctcttggaaaacccagccttgtggaaaggactaaccatgggcagtttcaggccatggccactcgcccttattataacccagagcttccctgcaggtacctcacgactccaccaccaggtgcccctgccctacaaaccgtgatcaccaccaccactaaagtgtcctaccaggcctaccagccccctgctatgaaatacagtgacagtgtgcgagaggtgaagagcctttcgagctgtaactatgctcctgaagatactgggatgtctgtctatccagaaccctggggtcctccggtgacagtcaccagggcagcctctccttcagggccacctcctatgaaaattgcaggagattgccgggccatcagacccactgtggctattccccacgagccagtttcctctaggacagatgaagcagagacttgggatgtgtgtctgtctgggctgggctccgcagtcagttactcagacagagtgggtcccttctttacctacaacaatgaggatttttgaaagacaatccaggggacataatagcagtgtgcatgcaggcaggaggcagggaaatgtgaaatggcaatgatctcttattgagttgggagattcaccttgtgtgcaaagaaacacagatagtagtaaaaattctgagtaactgagaaaataatcagttggaaatgattagataatatgggaaatttcacacagcattttgaaactggctacaatacatagaagtagtgaggaaagtgtgagtctctcaaatgaacaaataagcaaactgtaggaggttaaatactgacctaagttcacttagcttattagcaggagtagaagtcaaggattctggttcttattctaggacttttcccattagagcaccttagggaatttcacatccctagaggctgccaaaatagcttcaggaagaaatttttacaatcttatcacctgagtcatttcatgaaatttttgtttagcatttagaacctgttaaactagcttcaggaagtaattttgattgttttatctccaacgtgtgtatctacagcttttcaaaaaatctctagcaatggtaaagttcagttgtttttaaaagattcaatattagcttttcataacatgatagtttcctaaccttttcataaccttttcataacatgatagtttccataacagagacagcctaacaatgatgagttgtatttaatggattaccattgtactaaatacattttttttctgattaggtttcagaattataattaaaatgttttgctgaaatacaaaaaaaaaaaaaaa

SEQ ID NO: 202 - DNA, 2995 bp, Homo sapiens
ccctagccgcccctccccccagctagtgagtgcgcgaacgagaaaggaggagggcgctccaggcgacagcactgcagacgccattatcctctgtttctctgctgcaccgacctcgacgtcttgcctgtgtcccacttgttcgcggcctataggctactgcagcactggggtgtcagttgttggtccgacccagaacgcttcagttctgctctgcaaggatatataataactgattggtgtgcccgtttaataaaagaatatggaaactgaacagccagaagaaaccttccctaacactgaaaccaatggtgaatttggtaaacgccctgcagaagatatggaagaggaacaagcatttaaaagatctagaaacactgatgagatggttgaattacgcattctgcttcagagcaagaatgctggggcagtgattggaaaaggaggcaagaatattaaggctctccgtacagactacaatgccagtgtttcagtcccagacagcagtggccccgagcgcatattgagtatcagtgctgatattgaaacaattggagaaattctgaagaaaatcatccctaccttggaagagggcctgcagttgccatcacccactgcaaccagccagctcccgctcgaatctgatgctgtggaatgcttaaattaccaacactataaaggaagtgactttgactgcgagttgaggctgttgattcatcagagtctagcaggaggaattattggggtcaaaggtgctaaaatcaaagaacttcgagagaacactcaaaccaccatcaagcttttccaggaatgctgtcctcattccactgacagagttgttcttattggaggaaaacccgatagggttgtagagtgcataaagatcatccttgatcttatatctgagtctcccatcaaaggacgtgcacagccttatgatcccaatttttacgatgaaacctatgattatggtggttttacaatgatgtttgatgaccgtcgcggacgcccagtgggatttcccatgcggggaagaggtggttttgacagaatgcctcctggtcggggtgggcgtcccatgcctccatctagaagagattatgatgatatgagccctcgtcgaggaccacctccccctcctcccggacgaggcggccggggtggtagcagagctcggaatcttcctcttcctccaccaccaccacctagagggggagacctcatggcctatgacagaagagggagacctggagaccgttacgacggcatggttggtttcagtgctgatgaaacttgggactctgcaatagatacatggagcccatcagaatggcagatggcttatgaaccacagggtggctccggatatgattattcctatgcagggggtcgtggctcatatggtgatcttggtggacctattattactacacaagtaactattcccaaagatttggctggatctattattggcaaaggtggtcagcggattaaacaaatccgtcatgagtcgggagcttcgatcaaaattgatgagcctttagaaggatccgaagatcggatcattaccattacaggaacacaggaccagatacagaatgcacagtatttgctgcagaacagtgtgaagcagtatgcagatgttgaaggattctaatgcaagatattttttcttttttatagtgtgaagcagtattctggaaagtttttctaagactagtgaagaactgaaggagtcctgcatctttttttttttatctgcttctgtttaaaaagccaacattcctctgcttcataggtgttctgcatttgaggtgtagtgaaatctttgctgttcaccagatgtaatgttttagttccttacaaacagggttgggggggggaagggcgtgcaaaaactaacattgaaattttgaaacagcagcagagtgagtggattttatttttcgttattgttggtggtttaaaaaattccccccatgtaattattgtgaacaccttgctttgtggtcactgtaacatttggggggtgggacagggaggaaaagtaacaatagtccacatgtccctggcatctgttcagagcagtgtgcagaatgtaatgctcttttgtaagaaacgttttatgatttttaaaataaatttagtgaacctatttttggtggtcattttttttttaagacagtcattttaaaatggtggctgaatttcccaacccacccccaaactaaacactaagtttaattttcagctcctctgttggacatataagtgcatctcttgttggacataggcaaaataacttggcaaacttagttctggtgatttcttgatggtttggaagtctattgctgggaagaaattccatcatacatattcatgcttataataagctggggattttttgtttgtttttgcaaatgcttgcccctacttttcaacaattttctatgttagttgtgaagaactaaggtggggagcagtactacaagttgagtaatggtatgagtatataccagaattctgattggcagcaagttttattaatcagaataacacttggttatggaagtgactaatgctgaaaaaattgattatttttattagataatttctcacctatagacttaaactgtcaatttgctctagtgtcttattagttaaactttgtaaaatatatatatacttgtttttccattgtatgcaaattgaaagaaaaagatgtaccatttctctgttgtatgttggattatgtaggaaatgtttgtgtacaattcaaaaaaaaaaaagatgaaaaaagttcctgtggatgttttgtgtagtatcttggcatttgtattgatagttaaaattcacttccaaataaataaaacacccatgatgctagatttgatgtgtgcccgatttgaacaagggttgattgacacctgtaaaatttgttgaaacgttcctcttaaaaggaaatatagtaatcttatgtaaaaaaaaaaaaaaaaaa

SEQ ID NO: 203 - DNA, 1659 bp, Homo sapiens
agtttcgtccgagctcagtagagttttgctgttaagactgcgcgaggagctagagagagcggagagcgctgagccgggccgcacccgccgagccgtgaaaaaagtacatctcctggaagggatgctttttagctgagctctggtggatgagaggagctagccttgaaaaacttgatactgatggacattgtgtgggccagaggcagggatggttggctatgaccccaaaccagatggcaggaataacaccaagttccaggtggcagtggctgggtctgtgtctggacttgttactcgggcgctgatcagtcccttcgacgtcatcaagatccgtttccagcttcagcatgagcgcctgtctcgcagtgaccccagcgcaaagtaccatggcatcctccaggcctctaggcagattctgcaggaggagggtccgacagctttctggaaaggacacgtcccagctcagattctctccataggctatggagctgtccaattcttgtcatttgaaatgctgacggagctggtccacagaggcagcgtgtatgacgcccgggaattctcagtgcactttgtatgtggtggcctggctgcctgtatggccaccctcactgtgcaccccgtggatgttctgcgcacccgctttgcagctcagggtgagcccaaggtctataatacgctgcgccacgccgtggggaccatgtataggagcgaaggcccccaggttttctacaaaggcttggctcccaccttgatcgccatcttcccctacgccgggctgcagttctcttgctacagctccttgaagcacctgtacaagtgggccataccagccgaaggaaagaaaaatgagaacctccaaaacctgctttgtggcagtggagctggtgtcatcagcaagaccctgacatatccgctggacctcttcaagaagcggctacaggttggagggtttgagcatgccagagctgcctttggccaggtacggagatacaagggcctcatggactgtgccaagcaggtgctgcaaaaggaaggcgccctgggcttcttcaagggcctgtcccccagcttgctgaaggctgccctctccacaggcttcatgttcttctcgtatgaattcttctgtaatgtcttccactgcatgaacaggacagccagccagcgctgagtgcaggaaggaccccaggtcttccctggaggcagcctcctgaaggaaggaagattcagtctccactgagaggtgccgtctggcccttccctgcaggccagctgccccaagcggggtagcagccttgaacccacccagctgggacaccaccagaaggtccagggctctccccatgagagaatcagagggaatgcaggacgtggtctatggtgagccaacgacacagtgagaaggagcaggaagttgctgtttctcctctgaccagcccacactccaaaggaaacagacgccatcctacacctatcagccctgcctgccaggagaacagaacacactcctggtctggatggggctgctgcttgagtgcagagggctgcggtaggccctttgcaggagtcaggtccctacacttggcctgtttttccaacctatttaatagacattaaagctaaacacacattccttatcttaaaaaaaaaaaaaaaaaa

SEQ ID NO: 204 - DNA, 2388 bp, Homo sapiens
gggagaagccgagggcagcttagccacggccggttcccgttccctccaggacgcgagggtcgccttgggtggggaaccgcgaccgggcgaggacctatcccggtgtggggcttcccgatttcgaaagaatctcgctgcacccccgcccagagttcagaccaagcgaaaagttatttgagaggcctcgggggcgcggggtgaggagtcgtggcggaggccttggtcggggcgccgtggatatccccgagtcaccgcgtccctctcctgcagctcccgcgtcgctgggaggagcgagggagcgagcgggaaggggtctagctggcctttgctcggccctccccagcgcccggctttgaacccgccctgcactgctgtctgggcgggtccggggactcagcactcgacccaaaggtgcaggcgcgcgagcacaacccatggctgcgctgggctgcgcgaggctgaggtgggcgctgcgaggggccggccgtggcctctgcccccacggggccagagccaaggccgcgatccctgccgccctcccctcggacaaggccaccggagctcccggagccgggcctggtgtccggcggcggcaacggagcttagaggagattccacgtctaggacagctgcgcttcttctttcagctgttcgttcaaggctatgccctgcaactgcaccagttacaggtgctttacaaggccaagtacggtccaatgtggatgtcctacttagggcctcagatgcacgtgaacctggccagtgccccgctcttggagcaagtgatgcggcaagagggcaagtacccagtacggaacgacatggagctatggaaggagcaccgggaccagcacgacctgacctatgggccgttcaccacggaaggacaccactggtaccagctgcgccaggctctgaaccagcggttgctgaagccagcggaagcagcgctctatacggatgctttcaatgaggtgattgatgactttatgactcgactggaccagctgcgggcagagagtgcttcggggaaccaggtgtcggacatggctcaactcttctactactttgccttggaagctatttgctacatcctgttcgagaaacgcattggctgcctgcagcgatccatccccgaggacaccgtgaccttcgtcagatccatcgggttaatgttccagaactcactctatgccaccttcctccccaagtggactcgccccgtgctgcctttctggaagcgatacctggatggttggaatgccatcttttcctttgggaagaagctgattgatgagaagctcgaagatatggaggcccaactgcaggcagcagggccagatggcatccaggtgtctggctacctgcacttcttactggccagtggacagctcagtcctcgggaggccatgggcagcctgcctgagctgctcatggctggagtggacacgacatccaacacgctgacatgggccctgtaccacctctcaaaggaccctgagatccaggaggccttgcacgaggaagtggtgggtgtggtgccagccgggcaagtgccccagcacaaggactttgcccacatgccgttgctcaaagctgtgcttaaggagactctgcgtctctaccctgtggtccccacaaactcccggatcatagaaaaggaaattgaagttgatggcttcctcttccccaagaacacccagtttgtgttctgccactatgtggtgtcccgggaccccactgccttctctgagcctgaaagcttccagccccaccgctggctgagaaacagccagcctgctacccccaggatccagcacccatttggctctgtgccctttggctatggggtccgggcctgcctgggccgcaggattgcagagctggagatgcagctactcctcgcaaggctgatccagaagtacaaggtggtcctggccccggagacgggggagttgaagagtgtggcccgcattgtcctggttcccaataagaaagtgggcctgcagttcctgcagagacagtgctgagctgagtctccgccttgctggggcttgtcctagaggctccagctctggcacagtggttcctggctgctgccatgtctcagatgaggagggagagaaggaggccgccagactcgagaggtgggaggaactccttgcacacaccctgagcttttgccacttctatcatttttgagcaactccctctcagctaaaaggccacccctttatcgcattgctgtccttgggtagaatataaaataaagggacttttatttcttattggaaaaaaaaaaaaaaaaaaaaaaaaaaaaaaaaaaaaaaaaaaaaaaaaaaaaaaaaaaaaaaaaaaaaaaaaaaaaaaaaaaaaaaaaaaaaaaaa

SEQ ID NO: 205 - DNA, 823 bp, Homo sapiens
cacttccctcaacccttcccacaaactgggaggaaaactgagacctcctggtcacccgccgccgggccttttagaaactcccacaagctctgccttccctccctggtcctcttcagaccccctcttagttcttcgcggctaacggctcgcgctcggggccgggtgtggagctggaacagagggctggcaaggcgcgcatgcgcaccgagggtggagccgctgagcacagaaccggaaacttagagacaaagttcggagccccgcccccgccgcgcgccgctgagttgtctggccccgccgacccacggcccacgacccaccgacccacgaatcggcccggccgtcgcgtgcaccatgtctggctcctccagcgtcgccgctatgaagaaagtggttcaacagctccggctggaggccggactcaaccgcgtaaaagtttcccaggcagctgcagacttgaaacagttctgtctgcagaatgctcaacatgaccctctgctgactggagtatcttcaagtacaaatcccttcagaccccagaaagtctgttcctttttgtagtaaaatgaatctttcaaaggtttcccaaaccactccttatgatccagtgaatattcaagagagctacatttgaagcctgtacaaaagcttatccctgtaacacatgtgccataatatacaaacttctactttcgtcagtccttaacatctacctctctgaattttcatgaatttctatttcacaagggtaattgttttatatacactggcagcagcatacaataaaacttagtatgaaacttttaaaaaaaaaaaaaaaaaa

SEQ ID NO: 206 - DNA, 3142 bp, Homo sapiens
gactatcgcgagaatcggctcccggaagttccacgtcagtcagtctgacggtcagtggatcggtgggtttatctcaaggcctgagtagccggtaacaaacgagggttcccgggattggaccgacgcagccatgcctctgcgacttgatatcaaaagaaagctaactgctagatctgatcgagttaagagtgtggatctgcatcctacagagccatggatgttggcaagtctttacaatggcagtgtgtgtgtttggaatcatgaaacacagacactggtgaagacatttgaagtatgtgatcttcctgttcgagctgcaaagtttgttgcaaggaagaattgggttgtgacaggagcggatgacatgcagattagagtgttcaattacaatactctggagagagttcatatgtttgaagcacactcagactacattcgctgtattgctgttcatccaacccagcctttcattctaactagcagtgatgacatgcttattaagctctgggactgggataaaaaatggtcttgctcacaagtgtttgaaggacacacccattatgttatgcagattgtgatcaaccccaaagataacaatcagtttgccagtgcctctttggacaggactatcaaggtgtggcagttgggctcttcgtcaccaaacttcactttggaaggacatgagaaaggcgtgaattgcattgattactacagtggtggggacaagccatacctcatttcaggtgcagatgaccgtcttgttaaaatatgggattatcagaataaaacatgtgtgcagacactggaaggacatgcccaaaatgtgtcttgtgccagctttcatcctgagttgccaatcattatcacaggttcagaagatggaacagtacgtatttggcattcaagcacctaccggcttgagagcacactgaattatggaatggagagggtatggtgcgtggccagtctaagagggtcaaacaatgtcgctttgggctatgatgaagggagcatcattgttaagcttggtcgggaggaacctgccatgtccatggatgccaatggaaagataatttgggccaagcattcagaagtccagcaggccaacctaaaagcaatgggagatgctgaaattaaagatggtgaaagattgccactggcagtaaaggatatgggcagttgtgaaatataccctcagactattcagcacaatcctaatgggcggtttgtggtggtgtgtggtgatggggagtatatcatctacacagcaatggcattgagaaacaagagctttggatctgctcaggagtttgcatgggcccacgattcttcagagtatgcaataagagagagcaacagcattgtaaagatatttaagaactttaaggaaaaaaaatcatttaaaccagattttggagcagaaagtatctacggcggcttcttattgggagtcagatctgtaaatggcttagccttctatgactgggacaatacagaactcatacgaagaattgaaattcagcccaaacatattttctggtctgactctggagagctagtctgtattgctactgaggaatcattttttatccttaagtatctgtcagaaaaagtcttggctgcacaggaaacacatgagggagttactgaagatggcattgaagatgcctttgaggttcttggtgagattcaggaaattgtgaaaacagggctttgggtaggcgattgcttcatttacacaagttctgtgaacagattaaattattatgttggaggagaaatagtcaccattgcccacttggacaggacgatgtatctcctaggctacattcctaaagacaacaggctttatctgggggataaagaattgaacatcattagctattccctgctggtttcagtcctggaataccagacagctgtcatgcggagggactttagcatggctgataaggtccttcctaccattccaaaagaacagaggaccagagttgcacactttttggaaaagcagggcttcaagcagcaagctcttacagtatccacagatcctgagcatcgttttgagcttgctcttcagcttggagagttaaaaattgcataccagttagcagtggaagcagagtcagaacagaagtggaaacaacttgctgaacttgccattagtaaatgtcagtttggcctagcccaggagtgcctgcatcatgcacaggattatgggggcctgctgcttttggccactgcctctggaaatgctaatatggtgaacaagctagcagagggtgcggagagagatggcaaaaataatgtggcattcatgagctactttttacagggcaaggttgatgcctgcctagagctcttaattagaactggacggctgccagaagctgccttcttggcccgaacttacttacccagtcaggtttcaagggtagtgaaactctggagagagaatctctcaaaagtcaatcagaaagcagcagaatcccttgctgacccaacagagtatgaaaacctgttccctggattaaaagaagcctttgttgttgaagaatgggtgaaggaaacacatgctgatctgtggccagccaaacaatacccacttgtcacgccaaatgaagagagaaatgtcatggaagagggaaaagactttcagccctcaagatctacagctcaacaggaacttgatgggaaacctgcttctcctactccggttattgtggcctcccacacagccaacaaagaagaaaagagtttactcgaactagaagtagatttggataatttggaattagaagatattgacacaacagatatcaatctggatgaagatattttggatgattgactgtaatgctttccatttacctgactaaacagatcattattatatataggtattgattgctaccctgaccacagtgctttggactatgagaaacttcttagatttttatatgtaaatgctgtggaccactgggagcacaatgcccacatcatcttaagaagagtttatgtgcagcatttaaatcactgtgttttccttgttaactaaaacagacatgggctttgatttttttcatactattagaccatatctcataaaaccttttgaattaaaaaaaaaaaaaaaaaaaaa

SEQ ID NO: 207 - DNA, 584 bp, Homo sapiens
agacactctccaaaaagcagagacagcaggaagaggggagtggaggcagcccattcacctggggaaatgactgggttgtcgatggacggtggcggcagccccaagggggacgtggacccgttctactatgactatgagaccgttcgcaatgggggcctgatcttcgctggactggccttcatcgtggggctcctcatcctcctcagcagaagattccgctgtgggggcaataagaagcgcaggcaaatcaatgaagatgagccgtaacagcagcctcggcggtgccacccactgcactggggccagctgggaagccaagcatggccctgcctctggcgcctccccttcttccctgggctttagacctttgtccccgtcactgccagcgcttgggctgaaggaagctccagactcaatgtgacccccaggtggcatcgccaactcctgcctcgtgccacctcatgcttataataaagccggcgtcagagaccgctgcttccctcacctgcctgcctgtctccctcctctgtcaccaccagcctctccaagctcaagtacaaatacagccgggaaaaaaaaaaaaa

SEQ ID NO: 208 - DNA, 8761 bp, Homo sapiens
gccgaggaggaagaggttgatggcggcggcggagctccgagagacctcggctgggcaggggccggccgtggcgggccggggactgcgcctctagagccgcgagttctcgggaattcgccgcagcggacgcgctcggcgaatttgtgctcttgtgccctcctccgggcttgggcccaggcccggcccctcgcacttgcccttaccttttctatcgagtccgcatccctctccagccactgcgacccggcgaagagaaaaaggaacttcccccaccccctcgggtgccgtcggagccccccagcccacccctgggtgcggcgcggggaccccgggccgaagaagagatttcctgaggattctggttttcctcgcttgtatctccgaaagaattaaaaatggccgagaatgtggtggaaccggggccgccttcagccaagcggcctaaactctcatctccggccctctcggcgtccgccagcgatggcacagattttggctctctatttgacttggagcacgacttaccagatgaattaatcaactctacagaattgggactaaccaatggtggtgatattaatcagcttcagacaagtcttggcatggtacaagatgcagcttctaaacataaacagctgtcagaattgctgcgatctggtagttcccctaacctcaatatgggagttggtggcccaggtcaagtcatggccagccaggcccaacagagcagtcctggattaggtttgataaatagcatggtcaaaagcccaatgacacaggcaggcttgacttctcccaacatggggatgggcactagtggaccaaatcagggtcctacgcagtcaacaggtatgatgaacagtccagtaaatcagcctgccatgggaatgaacacagggatgaatgcgggcatgaatcctggaatgttggctgcaggcaatggacaagggataatgcctaatcaagtcatgaacggttcaattggagcaggccgagggcgacagaatatgcagtacccaaacccaggcatgggaagtgctggcaacttactgactgagcctcttcagcagggctctccccagatgggaggacaaacaggattgagaggcccccagcctcttaagatgggaatgatgaacaaccccaatccttatggttcaccatatactcagaatcctggacagcagattggagccagtggccttggtctccagattcagacaaaaactgtactatcaaataacttatctccatttgctatggacaaaaaggcagttcctggtggaggaatgcccaacatgggtcaacagccagccccgcaggtccagcagccaggcctggtgactccagttgcccaagggatgggttctggagcacatacagctgatccagagaagcgcaagctcatccagcagcagcttgttctccttttgcatgctcacaagtgccagcgccgggaacaggccaatggggaagtgaggcagtgcaaccttccccactgtcgcacaatgaagaatgtcctaaaccacatgacacactgccagtcaggcaagtcttgccaagtggcacactgtgcatcttctcgacaaatcatttcacactggaagaattgtacaagacatgattgtcctgtgtgtctccccctcaaaaatgctggtgataagagaaatcaacagccaattttgactggagcacccgttggacttggaaatcctagctctctaggggtgggtcaacagtctgcccccaacctaagcactgttagtcagattgatcccagctccatagaaagagcctatgcagctcttggactaccctatcaagtaaatcagatgccgacacaaccccaggtgcaagcaaagaaccagcagaatcagcagcctgggcagtctccccaaggcatgcggcccatgagcaacatgagtgctagtcctatgggagtaaatggaggtgtaggagttcaaacgccgagtcttctttctgactcaatgttgcattcagccataaattctcaaaacccaatgatgagtgaaaatgccagtgtgccctccctgggtcctatgccaacagcagctcaaccatccactactggaattcggaaacagtggcacgaagatattactcaggatcttcgaaatcatcttgttcacaaactcgtccaagccatatttcctacgccggatcctgctgctttaaaagacagacggatggaaaacctagttgcatatgctcggaaagttgaaggggacatgtatgaatctgcaaacaatcgagcggaatactaccaccttctagctgagaaaatctataagatccagaaagaactagaagaaaaacgaaggaccagactacagaagcagaacatgctaccaaatgctgcaggcatggttccagtttccatgaatccagggcctaacatgggacagccgcaaccaggaatgacttctaatggccctctacctgacccaagtatgatccgtggcagtgtgccaaaccagatgatgcctcgaataactccacaatctggtttgaatcaatttggccagatgagcatggcccagccccctattgtaccccggcaaacccctcctcttcagcaccatggacagttggctcaacctggagctctcaacccgcctatgggctatgggcctcgtatgcaacagccttccaaccagggccagttccttcctcagactcagttcccatcacagggaatgaatgtaacaaatatccctttggctccgtccagcggtcaagctccagtgtctcaagcacaaatgtctagttcttcctgcccggtgaactctcctataatgcctccagggtctcaggggagccacattcactgtccccagcttcctcaaccagctcttcatcagaattcaccctcgcctgtacctagtcgtacccccacccctcaccatactcccccaagcataggggctcagcagccaccagcaacaacaattccagcccctgttcctacacctcctgccatgccacctgggccacagtcccaggctctacatccccctccaaggcagacacctacaccaccaacaacacaacttccccaacaagtgcagccttcacttcctgctgcaccttctgctgaccagccccagcagcagcctcgctcacagcagagcacagcagcgtctgttcctaccccaacagcaccgctgcttcctccgcagcctgcaactccactttcccagccagctgtaagcattgaaggacaggtatcaaatcctccatctactagtagcacagaagtgaattctcaggccattgctgagaagcagccttcccaggaagtgaagatggaggccaaaatggaagtggatcaaccagaaccagcagatactcagccggaggatatttcagagtctaaagtggaagactgtaaaatggaatctaccgaaacagaagagagaagcactgagttaaaaactgaaataaaagaggaggaagaccagccaagtacttcagctacccagtcatctccggctccaggacagtcaaagaaaaagattttcaaaccagaagaactacgacaggcactgatgccaactttggaggcactttaccgtcaggatccagaatcccttccctttcgtcaacctgtggaccctcagcttttaggaatccctgattactttgatattgtgaagagccccatggatctttctaccattaagaggaagttagacactggacagtatcaggagccctggcagtatgtcgatgatatttggcttatgttcaataatgcctggttatataaccggaaaacatcacgggtatacaaatactgctccaagctctctgaggtctttgaacaagaaattgacccagtgatgcaaagccttggatactgttgtggcagaaagttggagttctctccacagacactgtgttgctacggcaaacagttgtgcacaatacctcgtgatgccacttattacagttaccagaacaggtatcatttctgtgagaagtgtttcaatgagatccaaggggagagcgtttctttgggggatgacccttcccagcctcaaactacaataaataaagaacaattttccaagagaaaaaatgacacactggatcctgaactgtttgttgaatgtacagagtgcggaagaaagatgcatcagatctgtgtccttcaccatgagatcatctggcctgctggattcgtctgtgatggctgtttaaagaaaagtgcacgaactaggaaagaaaataagttttctgctaaaaggttgccatctaccagacttggcacctttctagagaatcgtgtgaatgactttctgaggcgacagaatcaccctgagtcaggagaggtcactgttagagtagttcatgcttctgacaaaaccgtggaagtaaaaccaggcatgaaagcaaggtttgtggacagtggagagatggcagaatcctttccataccgaaccaaagccctctttgcctttgaagaaattgatggtgttgacctgtgcttctttggcatgcatgttcaagagtatggctctgactgccctccacccaaccagaggagagtatacatatcttacctcgatagtgttcatttcttccgtcctaaatgcttgaggactgcagtctatcatgaaatcctaattggatatttagaatatgtcaagaaattaggttacacaacagggcatatttgggcatgtccaccaagtgagggagatgattatatcttccattgccatcctcctgaccagaagatacccaagcccaagcgactgcaggaatggtacaaaaaaatgcttgacaaggctgtatcagagcgtattgtccatgactacaaggatatttttaaacaagctactgaagatagattaacaagtgcaaaggaattgccttatttcgagggtgatttctggcccaatgttctggaagaaagcattaaggaactggaacaggaggaagaagagagaaaacgagaggaaaacaccagcaatgaaagcacagatgtgaccaagggagacagcaaaaatgctaaaaagaagaataataagaaaaccagcaaaaataagagcagcctgagtaggggcaacaagaagaaacccgggatgcccaatgtatctaacgacctctcacagaaactatatgccaccatggagaagcataaagaggtcttctttgtgatccgcctcattgctggccctgctgccaactccctgcctcccattgttgatcctgatcctctcatcccctgcgatctgatggatggtcgggatgcgtttctcacgctggcaagggacaagcacctggagttctcttcactccgaagagcccagtggtccaccatgtgcatgctggtggagctgcacacgcagagccaggaccgctttgtctacacctgcaatgaatgcaagcaccatgtggagacacgctggcactgtactgtctgtgaggattatgacttgtgtatcacctgctataacactaaaaaccatgaccacaaaatggagaaactaggccttggcttagatgatgagagcaacaaccagcaggctgcagccacccagagcccaggcgattctcgccgcctgagtatccagcgctgcatccagtctctggtccatgcttgccagtgtcggaatgccaattgctcactgccatcctgccagaagatgaagcgggttgtgcagcataccaagggttgcaaacggaaaaccaatggcgggtgccccatctgcaagcagctcattgccctctgctgctaccatgccaagcactgccaggagaacaaatgcccggtgccgttctgcctaaacatcaagcagaagctccggcagcaacagctgcagcaccgactacagcaggcccaaatgcttcgcaggaggatggccagcatgcagcggactggtgtggttgggcagcaacagggcctcccttcccccactcctgccactccaacgacaccaactggccaacagccaaccaccccgcagacgccccagcccacttctcagcctcagcctacccctcccaatagcatgccaccctacttgcccaggactcaagctgctggccctgtgtcccagggtaaggcagcaggccaggtgacccctccaacccctcctcagactgctcagccaccccttccagggcccccacctgcagcagtggaaatggcaatgcagattcagagagcagcggagacgcagcgccagatggcccacgtgcaaatttttcaaaggccaatccaacaccagatgcccccgatgactcccatggcccccatgggtatgaacccacctcccatgaccagaggtcccagtgggcatttggagccagggatgggaccgacagggatgcagcaacagccaccctggagccaaggaggattgcctcagccccagcaactacagtctgggatgccaaggccagccatgatgtcagtggcccagcatggtcaacctttgaacatggctccacaaccaggattgggccaggtaggtatcagcccactcaaaccaggcactgtgtctcaacaagccttacaaaaccttttgcggactctcaggtctcccagctctcccctgcagcagcaacaggtgcttagtatccttcacgccaacccccagctgttggctgcattcatcaagcagcgggctgccaagtatgccaactctaatccacaacccatccctgggcagcctggcatgccccaggggcagccagggctacagccacctaccatgccaggtcagcagggggtccactccaatccagccatgcagaacatgaatccaatgcaggcgggcgttcagagggctggcctgccccagcagcaaccacagcagcaactccagccacccatgggagggatgagcccccaggctcagcagatgaacatgaaccacaacaccatgccttcacaattccgagacatcttgagacgacagcaaatgatgcaacagcagcagcaacagggagcagggccaggaataggccctggaatggccaaccataaccagttccagcaaccccaaggagttggctacccaccacagcagcagcagcggatgcagcatcacatgcaacagatgcaacaaggaaatatgggacagataggccagcttccccaggccttgggagcagaggcaggtgccagtctacaggcctatcagcagcgactccttcagcaacagatggggtcccctgttcagcccaaccccatgagcccccagcagcatatgctcccaaatcaggcccagtccccacacctacaaggccagcagatccctaattctctctccaatcaagtgcgctctccccagcctgtcccttctccacggccacagtcccagcccccccactccagtccttccccaaggatgcagcctcagccttctccacaccacgtttccccacagacaagttccccacatcctggactggtagctgcccaggccaaccccatggaacaagggcattttgccagcccggaccagaattcaatgctttctcagcttgctagcaatccaggcatggcaaacctccatggtgcaagcgccacggacctgggactcagcaccgataactcagacttgaattcaaacctctcacagagtacactagacatacactagagacaccttgtagtattttgggagcaaaaaaattattttctcttaacaagactttttgtactgaaaacaatttttttgaatctttcgtagcctaaaagacaattttccttggaacacataagaactgtgcagtagccgtttgtggtttaaagcaaacatgcaagatgaacctgagggatgatagaatacaaagaatatatttttgttatggctggttaccaccagcctttcttcccctttgtgtgtgtggttcaagtgtgcactgggaggaggctgaggcctgtgaagccaaacaatatgctcctgccttgcacctccaataggttttattattttttttaaattaatgaacatatgtaatattaatagttattatttactggtgcagatggttgacatttttccctattttcctcactttatggaagagttaaaacatttctaaaccagaggacaaaaggggttaatgttactttaaaattacattctatatatatataaatatatataaatatatattaaaataccagttttttttctctgggtgcaaagatgttcattcttttaaaaaatgtttaaaaaaaaaaaaaaactgcctttcttcccctcaagtcaacttttgtgctccagaaaattttctattctgtaagtctgagcgtaaaacttcaagtattaaaataatttgtacatgtagagagaaaaatgactttttcaaaaatatacaggggcagctgccaaattgatgtattatatattgtggtttctgtttcttgaaagaatttttttcgttatttttacatctaacaaagtaaaaaaattaaaaagagggtaagaaacgattccggtgggatgattttaacatgcaaaatgtccctgggggtttcttctttgcttgctttcttcctccttaccctaccccccactcacacacacacacacacacacacacacacacacacacacacactttctataaaacttgaaaatagcaaaaaccctcaactgttgtaaatcatgcaattaaagttgattacttataaatatgaactttggatcactgtatagactgttaaatttgatttcttattacctattgttaaataaactgtgtgagacagaca

SEQ ID NO: 209 - DNA, 784 bp, Homo sapiens
gcccacgcgccagagtcgcagtgggcgggcctacgtgctccgcccgctgtgagcctgtccggcccccgcccgctccggagcaacccgcgagcttacaccggcttctctctgtcctcagcccgcgcgccgccatcgccgtcatgctgggcgccgctctccgccgctgcgctgtggccgcaaccacccgggccgaccctcgaggcctcctgcactccgcccggacccccggccccgccgtggctatccagtcagttcgctgctattcccatgggtcacaggagacagatgaggagtttgatgctcgctgggtaacatacttcaacaagccagatatagatgcctgggaattgcgtaaagggataaacacacttgttacctatgatatggttccagagcccaaaatcattgatgctgctttgcgggcatgcagacggttaaatgattttgctagtacagttcgtatcctagaggttgttaaggacaaagcaggacctcataaggaaatctacccctatgtcatccaggaacttagaccaactttaaatgaactgggaatctccactccggaggaactgggccttgacaaagtgtaaaccgcatggatgggcttccccaaggatttattgacattgctacttgagtgtgaacagttacctggaaatactgatgataacatattaccttatttgaacaagttttcctttattgagtaccaagccatgtaatggtaacttggactttaataaaagggaaatgagtttgaactgaaaaaaaaaaaaaaaaa

SEQ ID NO: 210 - DNA, 3961 bp, Homo sapiens
gtgtgtgtgagtgcgagagtgtgtaagccagtgtgtgtgccgtccccctgctggggacagcagctgggtccagcagagagctggctgggggcttgacaggagtttatcctaactgatgctgggtgggcgcaggccctgagatgggcgtcagggagaggggacgccagacacacggcctgagcagggtgaggagcagctgccagccccggcaggcccaggccctgtctgggtgcacaggacagagacacagcaagatgcccagggagtgccgcttcctgggctagagacaagcaccagcctgcagtggagaacgcaggaccccgctgcccagaaggagcagccacggcctgcggaggactggcccagcaaggtcccaggtcttccctctcctcagcgcctaagagagaggcccagtgcgggtgaggagtcgcgaggaagaggcggaaggcgccggaaggcaccatgttccgcaagaaaaagaagaaacgccctgagatctcagcgccacagaacttccagcaccgtgtccacacctccttcgaccccaaagaaggcaagtttgtgggcctccccccacaatggcagaacatcctggacacactgcggcgccccaagcccgtggtggacccttcgcgaatcacacgggtgcagctccagcccatgaagacagtggtgcggggcagcgcgatgcctgtggatggctacatctcggggctgctcaacgacatccagaagttgtcagtcatcagctccaacaccctgcgtggccgcagccccaccagccggcggcgggcacagtccctggggctgctgggggatgagcactgggccaccgacccagacatgtacctccagagcccccagtctgagcgcactgacccccacggcctctacctcagctgcaacgggggcacaccagcaggccacaagcagatgccgtggcccgagccacagagcccacgggtcctgcccaatgggctggctgcaaaggcacagtccctgggccccgccgagtttcagggtgcctcgcagcgctgtctgcagctgggtgcctgcctgcagagctccccaccaggagcctcgccccccacgggcaccaataggcatggaatgaaggctgccaagcatggctctgaggaggcccggccacagtcctgcctggtgggctcagccacaggcaggccaggtggggaaggcagccctagccctaagacccgggagagcagcctgaagcgcaggctattccgaagcatgttcctgtccactgctgccacagcccctccaagcagcagcaagccaggccctccaccacagagcaagcccaactcctctttccgaccgccgcagaaagacaaccccccaagcctggtggccaaggcccagtccttgccctcggaccagccggtggggaccttcagccctctgaccacttcggataccagcagcccccagaagtccctccgcacagccccggccacaggccagcttccaggccggtcttccccagcgggatccccccgcacctggcacgcccagatcagcaccagcaacctgtacctgccccaggaccccacggttgccaagggtgccctggctggtgaggacacaggtgttgtgacacatgagcagttcaaggctgcgctcaggatggtggtggaccagggtgacccccggctgctgctggacagctacgtgaagattggcgagggctccaccggcatcgtctgcttggcccgggagaagcactcgggccgccaggtggccgtcaagatgatggacctcaggaagcagcagcgcagggagctgctcttcaacgaggtggtgatcatgcgggactaccagcacttcaacgtggtggagatgtacaagagctacctggtgggcgaggagctgtgggtgctcatggagttcctgcagggaggagccctcacagacatcgtctcccaagtcaggctgaatgaggagcagattgccactgtgtgtgaggctgtgctgcaggccctggcctacctgcatgctcagggtgtcatccaccgggacatcaagagtgactccatcctgctgaccctcgatggcagggtgaagctctcggacttcggattctgtgctcagatcagcaaagacgtccctaagaggaagtccctggtgggaaccccctactggatggctcctgaagtgatctccaggtctttgtatgccactgaggtggatatctggtctctgggcatcatggtgattgagatggtagatggggagccaccgtacttcagtgactccccagtgcaagccatgaagaggctccgggacagccccccacccaagctgaaaaactctcacaaggtctccccagtgctgcgagacttcctggagcggatgctggtgcgggacccccaagagagagccacagcccaggagctcctagaccaccccttcctgctgcagacagggctacctgagtgcctggtgcccctgatccagctctaccgaaagcagacctccacctgctgagcccaccccaagtatgcctgccacctacgcccacaggcagggcacactgggcagccagcctgccggcaggacttgcctgcctcctcctctcagtattctctccaaagattgaaatgtgaagccccagccccaccctctgcccttcagcctactgggccaggccggacctgccccctcagtgtctctccctcccgagtccccagatggagacccctttctacaggatgaccccttgatatttgcacagggatatttctaagaaacgcagaggccagcgttcctggcctctgcagccaacacagtagaaaaggctgctgtggttttttaaaggcagttgtccactagtgtcctaggccactgcagagggcagactgctggtctccacagatacctgctgttctcagctccagcttcaaacctcgagtctcgagagggccacggggtggtttttatgaccggaatcccgcttcctccctcacgtctgatgtcctgaaggtgcagtcccacctgtacagcccctccccgcccagaactgtgaatggcctgctccaggccatggctgggggcagggagtgaggggacaatttctgagtgaaagagaaagaatggggtcggtggtgaaggtgctctcactttacagaatggagagaacatcgtgtgtgtgtgtgtgtgtgtgtgtgtgtgtgtgtgtgtgtaaggggaggaaagccaccttgacagcccaggtccctccaggtcacccacagccagtttcaggaaggctgcccctctctcccactaagttctggcctgaagggacctgctttcttggcctggcttccacctctccactcctgtgtctacctggccagtggagtggtccatgctaagtctaacactcctgggagctcaggaggcttctgagcttctcctgtactgtgcatcgtgagggccagagacaggaatgtaaggattggcaactgtgttacctttcaagtttatctcaataaccaggtcatcagggacccattgttctcttcagaaccctatctgggagagaaggcgaaccacctccgggtttccatcatgtcaaggtcacaggcatccatgtgtgcaaaccatctgccccagctgcctccacagactgctgtctccttgtcctcctcggccctgccccacttcagggctgctgtgagatggaattccaggaaagaacttcaggtgtctggaccctttctatctagataatatttttagattcttctgctccctagtgacctacctgggggcaaagaaattgcaaggacttttttttaagggtcagagttttcaaaacaaaagcatcttccctagaaatttttgtgaattgtttgcacttgtgcctgttttaaattaaattgagtgttcaaagccaaaaaaaaaaaaaaaaaaaaaaaaaaaaaaaaaaaaaaaaaaaaaaaaaaaaaaaaaaaaa

SEQ ID NO: 211 - DNA, 1589 bp, Homo sapiens
gcgcacgcgcaacctaacgcgggactgccagcaacttccgggcgtttacaggcaggcaggtcagtgatgtgtcctaagggtccgaccgacctagatacccctctttgattcctcctcttgggattagtgtccatctctggaagcaggatccaggaggacgggaggggccgctgcggaccgcagtcgctccacctggaggagacaccagaaggaagacagcctgagggacgcagccatccccggctcctaccggcgccccgccccgcgcatgcgcacgcgcacagggagtcagctggctgcgcgggaggtcacgggaagtggggcggtgcccagacagctggagggaaggaggtgtcaggcggggagagacgcaaacggcgggaccagcagcgacggtagcagcagcatggccgcgatctatgggggtgtagaggggggaggcacacgatccgaggtccttttagtctcagaggatgggaagatcctggcagaagcagatggactgagcacaaaccactggctgatcgggacagacaagtgtgtggagaggatcaatgagatggtgaacagggccaaacggaaagcaggggtggatcctctggtaccgctgcgaagcttgggcctatctctgagcggtggggaccaggaggacgcggggaggatcctgatcgaggagctgagggaccgatttccctacctgagtgaaagctacttaatcaccaccgatgccgccggctccatcgccacagctacaccggatggtggagttgtgctcatatctggaacaggctccaactgcaggctcatcaaccctgatggctccgagagtggctgcggcggctggggccatatgatgggtgatgagggttcagcctactggatcgcacaccaagcagtgaaaatagtgtttgactccattgacaacctagaggcggctcctcatgatatcggctacgtcaaacaggccatgttccactatttccaggtgccagatcggctagggatactcactcacctgtatagggactttgataaatgcaggtttgctgggttttgccggaaaattgcagaaggtgctcagcagggagaccccctttcccgctatatcttcaggaaggctggggagatgctgggcagacacatcgtagcagtgttgcccgagattgacccggtcttgttccagggcaagattggactccccatcctgtgcgtgggctctgtgtggaagagctgggagctgctgaaggaaggttttcttctggcgctgacccagggcagagagatccaggctcagaacttcttctccagcttcaccctgatgaagctgaggcactcctccgctctgggtggggccagcctaggggccaggcacatcgggcacctcctccccatggactatagcgccaatgccattgccttctattcctacaccttttcctagggggctggtcccggctccaccccctccaagctcagtggacactgggtctgaaaggaaggagtcttttgcttcctttctcctttttacaaaaacaaacatagaagaaaataaatgcactttatccactccccaaaaaaaaaaaaaaaaa

SEQ ID NO: 212 - DNA, 801 bp, Homo sapiens
gcggcgttgtagttaagctcgtgtaacggcggcggtgtcggcagctgctgtagcgaagagagtttggcgcgatgtctcacaccattttgctggtacagcctaccaagaggccagaaggcagaacttatgctgactacgaatctgtgaatgaatgcatggaaggtgtttgtaaaatgtatgaagaacatctgaaaagaatgaatcccaacagtccctctatcacatatgacatcagtcagttgtttgatttcatcgatgatctggcagacctcagctgcctggtttaccgagctgatacccagacataccagccttataacaaagactggattaaagagaagatctacgtgctccttcgtcggcaggcccaacaggctgggaaataattgtgttggaagcactgggggggttggggtgggcttggaacacaggtgtgtacagcgtgctgtagtggaagttttgtatcatagtaatcctgtttccactttgttatactctagccaagattgactgtattagatgaaatgtgaggatcttgttcaatcggaaacccccgttacctcctctttttctttctctttctttttttttttttacttaaacatttttatgatgatttagatggaagttgttcttcgtcacttaatgttggttccagtccttcaactgttcatatctactttataacattcacatactaacccttcttcaagatggggtggggggtggaaatgcagtttagccatgtcctcaagataaagtcttggtaaaaataaataaatgtcctttagttatattttc

SEQ ID NO: 213 - DNA, 2494 bp, Homo sapiens
cggccttggccggcgcgggtaggcgcgggagcctcgagcgccgctcggatgcagcagccgagccgccactcggcgcgcggcgggagacccagggcaagccgccgtcggcgcgctgggtgcgggaagggggctctggatttcggtccctcccctttttcctctgagtctcggaacgctccggctctcagaccctcttcctcccaggtaaaggccgggagaggagggcgcatctcttttccaggcaccccaccatgggcaatgcctccaatgactcccagtctgaggactgcgagacgcgacagtggcttcccccaggcgaaagcccagccatcagctccgtcatgttctcggccggggtgctggggaacctcatagcactggcgctgctggcgcgccgctggcggggggacgtggggtgcagcgccggccgcaggagctccctctccttgttccacgtgctggtgaccgagctggtgttcaccgacctgctcgggacctgcctcatcagcccagtggtactggcttcgtacgcgcggaaccagaccctggtggcactggcgcccgagagccgcgcgtgcacctacttcgctttcgccatgaccttcttcagcctggccacgatgctcatgctcttcgccatggccctggagcgctacctctcgatcgggcacccctacttctaccagcgccgcgtctcgcgctccgggggcctggccgtgctgcctgtcatctatgcagtctccctgctcttctgctcgctgccgctgctggactatgggcagtacgtccagtactgccccgggacctggtgcttcatccggcacgggcggaccgcttacctgcagctgtacgccaccctgctgctgcttctcattgtctcggtgctcgcctgcaacttcagtgtcattctcaacctcatccgcatgcaccgccgaagccggagaagccgctgcggaccttccctgggcagtggccggggcggccccggggcccgcaggagaggggaaagggtgtccatggcggaggagacggaccacctcattctcctggctatcatgaccatcaccttcgccgtctgctccttgcctttcacgatttttgcatatatgaatgaaacctcttcccgaaaggaaaaatgggacctccaagctcttaggtttttatcaattaattcaataattgacccttgggtctttgccatccttaggcctcctgttctgagactaatgcgttcagtcctctgttgtcggatttcattaagaacacaagatgcaacacaaacttcctgttctacacagtcagatgccagtaaacaggctgacctttgaggtcagtagtttaaaagttcttagttatatagcatctggaagatcattttgaaattgttccttggagaaatgaaaacagtgtgtaaacaaaatgaagctgccctaataaaaaggagtatacaaacatttaagctgtggtcaaggctacagatgtgctgacaaggcacttcatgtaaagtgtcagaaggagctacaaaacctaccctcagtgagcatggtacttggcctttggaggaacaatcggctgcattgaagatccagctgcctattgatttaagctttcctgttgaatgacaaagtatgtggttttgtaatttgtttgaaaccccaaacagtgactgtactttctattttaatcttgctactaccgttatacacatatagtgtacagccagaccagattaaacttcatatgtaatctctaggaagtcaatatgtggaagcaaccaagcctgctgtcttgtgatcacttagcgaaccctttatttgaacaatgaagttgaaaatcataggcaccttttactgtgatgtttgtgtatgtgggagtactctcatcactacagtattactcttacaagagtggactcagtgggttaacatcagttttgtttactcatcctccaggaactgcaggtcaagttgtcaggttatttattttataatgtccatatgctaatagtgatcaagaagactttaggaatggttctctcaacaagaaataatagaaatgtctcaaggcagttaattctcattaatactctttatttatcctatttctgggggaggatgtacgtggccatgtatgaagccaaatattaggcttaaaaactgaaaaatctggttcattcttcagatatactggaacccttttaaagttgatattggggccatgagtaaaatagattttataagatgactgtgttgtaccaaaattcatctgtctatattttatttagggaacatggtttgactcatcttatatgggaaaccatgtagcagtgagtcatatcttaatatatttctaaatgtttggcatgtaaatgtaaactcagcatcaaaatatttcagtgaatttgcactgtttaatcatagttactgtgtaaactcatctgaaatgttacaaaaataaactataaaacaaaaatttgaaaaaaaaaaaaaaaaaa

SEQ ID NO: 214 - DNA, 7836 bp, Homo sapiens
agggggcggagcgcaaaggacagaagctccggcaccgagtcggggcagagtcccgctgagtccgagcgctgctgaggcagctggcgagacggcacgtctggaggcgaggcgggcgcactgaaaggaggccggcgcgcccgcggccccggctcgcgttctgttcaggttcgtgggcctgcagaggagagactcgaactcgtggaacccgcgcaccgtggagtctgtccgcccagtccgtccggggtgcgcgaccaggagagctaggttctcgccactgcgcgctcggcaggcgtcggctgtgtcgggagcgcgcccgccgcccctcagctgcccggcccggagcccgagacgcgcgcaccatgagcggtggtgaagtggtctgctccggatggctccgcaagtcccccccggagaaaaagttgaagcgttatgcatggaagaggagatggttcgtgttacgcagtggccgtttaactggagatccagatgttttggaatattacaaaaatgatcatgccaagaagcctattcgtattattgatttaaatttatgtcaacaagtagatgctggattgacatttaacaaaaaagagtttgaaaacagctacatttttgatatcaacactattgaccggattttctacttggtagcagacagcgaggaggagatgaataagtgggttcgttgtatttgtgacatctgtgggtttaatccaacagaagaagatcctgtgaagccacctggcagctctttacaagcaccagctgatttacctttagctataaatacagcaccaccatccacccaggcagattcatcctctgctactctacctcctccatatcagctaatcaatgttccaccacacctggaaactcttggcattcaggaggatcctcaagactacctgttgctcatcaactgtcaaagcaagaagcccgaacccaccagaacgcatgctgattctgcaaaatccacctcttctgaaacagactgcaatgataacgtcccttctcataaaaatcctgcttcctcccagagcaaacatggaatgaatggcttttttcagcagcaaatgatatacgactctccaccttcacgtgccccatctgcttcagttgactccagcctttataacctgcccaggagttattcccatgatgttttaccaaaggtgtctccatcaagtactgaagcagatggagaactctatgtttttaataccccatctgggacatcgagtgtagagactcaaatgaggcatgtatctattagttatgacattcctccaacacctggtaatacttatcagattccacgaacatttccagaaggaaccttgggacagacatcaaagctagacactattccagatattcctccacctcggccaccgaaaccacatccagctcatgaccgatctcctgtggaaacgtgtagtatcccacgcaccgcctcagacactgacagtagttactgtatccctacagcagggatgtcgccttcacgtagtaataccatttccactgtggatttaaacaaattgcgaaaagatgctagttctcaagactgctatgatattccacgagcatttccaagtgatagatctagttcacttgaaggcttccataaccactttaaagtcaaaaatgtgttgacagtgggaagtgtttcaagtgaagaactggatgaaaattacgtcccaatgaatcccaattcaccaccacgacaacattccagcagttttacagaaccaattcaggaagcaaattatgtgccaatgactccaggaacatttgatttttcctcatttggaatgcaagttcctcctcctgctcatatgggcttcaggtccagcccaaaaacccctcccagaaggccagttcctgttgcagactgtgaaccaccccccgtggataggaacctcaagccagacagaaaagtcaagccagcgcctttagaaataaaacctttgccagaatgggaagaattacaagccccagttagatctcccatcactaggagttttgctcgagactcttccaggtttcccatgtccccccgaccagattcagtgcatagcacaacttcaagcagtgactcacacgacagtgaagagaattatgttcccatgaacccaaacctgtccagtgaagacccaaatctctttggcagtaacagtcttgatggaggaagcagccctatgatcaagcccaaaggagacaaacaggtggaatacttagatctcgacttagattctgggaaatccacaccaccacgtaagcaaaagagcagtggctcaggcagcagtgtagcagatgagagagtggattatgttgttgttgaccaacagaagaccttggctctaaagagtacccgggaagcctggacagatgggagacagtccacagaatcagaaacgccagcgaagagtgtgaaatgaaaatattgccttgccatttctgaacaaaagaaaactgaattgtaaagataaatcccttttgaagaatgacttgacacttccactctaggtagatcctcaaatgagtagagttgaagtcaaaggacctttctgacataatcaagcaatttagacttaagtggtgctttgtggtatctgaacaattcataacatgtaaataatgtgggaaaatagtattgtttagctcccagagaaacatttgttccacagttaacacactcgtagtattactgtatttatgcactttttcatctaaaacattgttctgggttttcccaatgtaccttaccataattcctttgggagttcttgttttttgtcacactactttatataacaatactaagtcaactaagctacttttagatttggaaattgctgtttacagtctaacaacattaaaatgagaggtagattcacaagttagctttctacctgaagcttcaggtgataaccattagcttatacttggactcatcatttgttgccttccaaaatgctgaggataatgtatgtactggtgtcaggacctagttctctggttaatgtacatttagtttttaatggtggaactttgttatattttgttaattacagtgtttttggttcattgagtgaagattctgccgggtgggatcttgcacctttgaaagactgaataattacactaccaagtaagcctgcaaatcattgatggcatgcagtgatgatgtgctcttacacttgttaacatgtattaagtgttatttgcaaaaggtagattatgtaaccaatcaggtacgtaccaggcagtgatgtgctaatacactgatcaggtttagacaatgagctttggttgtgttcttgttagtcctaatattggttttcagtttggaattaataaagcagttgacattcactgttagttacagcaacatactgtgatttttaattagatagtaattcagatttattactctatgaaattctgtcttttgacaccatagtgccctttctatgattttttttacttaatattcttcttggccttatatttaattccctatgcaattaatattttatatctgcatttttttaaaaaaaatagatgttatataagtgattctcgtatgtagcacctgttgcttttccactgaaagaattacggattttgtactgtgatttatattcactgccccaattcaagaaatattggagccttgctacaatgtgaaatgttatagtcatggactccttccaaccagatttctgaaaacaccagagggatggtataattctgtctcacctataacatggtcctgtgacatagatattaagaccacaagttgtagtgaggctacaattatattcgtctgtcttggctttgcaacataatttagaaagcacgtatagttgttttttaaccaagttacatacaatctcatgtactgatttgagacttataacaatttttggagggggcatagagaaaggagtgcccacagttgaggcatgaccccctccattcagacctctaactgttgcctgagtacacagatgtgccctgatttctggcccattggccatagtactgtgcctaatcaatgtaataggtttattttcccaatcctcaaactaaaaatgttcataacaagatgaattgtagactagtaacatttgatgcttttaaatatttgcttctttttaaacaaaaactaaaacccagaagtgaatttttaggtggatttttaaataaaaaagattgattgagtttggtgtgcaagctgttttataatgaaacaacaaaatgaaatctaaaatcctgaaatgtgcctaaactatcaaaacacacgatacagctaatgtgtaaagatgctaaattctgttacttggaggatgaatatatttaagatttaaaacacaataataaatacatgattaattcaaaaataaaaatctttacagctgcctatcaagggtctaaagcacttaatgaatgtttttagtctaacttatcattaactttttacaagtcaccatatttgaagatctgtagcactctgattttcagaaaatttttcattctgaataatttaaaaatggtgatgtattagaaaggcagtttgctttagaaaactaaatcacattgaacattgtattagagaattaaattaaaagtttcttacagagcagtattttccaaacatttttagcactagaatctttttagatgaaattttatgtataaccccaatacataaagcctgaaaactcaattttatcaatataaatgtattttgggttcacatttatgcttattcattttggctcattactaagcataataagattctgagttatttctgaataacacaaatgtggagttatacatagttgatgaaaccagcagccaatttatagctatgccctgttttatttgtatactatcaagaaaattttgattcacacaaatgtaagcaaaaataataggttttaaacatacatctcaggaaattctttaattagagatagctaaagttattcaaggtctatacaaaaataagttatcctggtagtggaagttaatacataagcagtctccagtgtggtaaagtagggtatgtaacacatcagaatgtgcgtttttattaggttttaaaatatgcacgtataaaaactaaatttgaatcaaacccttttaactcacctccaagaagctagactttggccaggaatgggctaaaaaccactggttaacgatgtgacagttatgatcttggagattggaaatctttcttccacattagagttctttaccttaattccttattctgaaaaattgtaagattttatgaaggtttgaatactgaagcacagttctgctttcaaaaattaaaattcaaacttgaaaaagctgtttaacccatggaagatatcatttagtaagatgtaaaagattttttaaatctacacttcagtttatacatctttatcattatcaatactatataagttactgtgagcattttagagaattccataaaggtactatgagtgtgtctgtatgtgtgtgtatatatagcattgtatttaatcatagactaaatttaatttgatatagaaatactactttacttgtacattaaggtcataatttctgctggactcttttatatttaattaatggggattatagtcttccttcataaatgcatttaaacctgaaattgaacaccagtgtttttctttttctacttatgggaagttgtctgcttccccctttagagaaaacagtatttttatattttgttaaaatattaactactttatgcctacacactatgctgtagatactgatcataattcttgggtgttcacaaacactcctagtgcctcttttttggcccgttgaaagtgttggtattactactttcactacagagcctttggccctctaataatgctgaggtgggctgatccttcccatttctgtcttcgggtcattctggtaggtcttctcctccactgtcaagtaagcaatcaggtccgtgacagggattggacatatgaacaaattaagtggatacacacagtgagaaagatacatgcattctatggtaacaactactgtcaataacatctgatgttacatgcacatttatatatatataattttaaaaactgaactatgagaagccatggtataaatgaatattgtggacatcatggacttgatatgatagaaatcaattgtcagcttgagaaagttgtttttaatctgtctaaatagttcatgcattactacagttaaaaatagtttcatttgtcttctatagacttaattttattccggttcagtataatctctgttaacagagtttcagcaaactgattggtcaaggtattaacatagcttctacttcctttacttaaaaagatgtggttttatgtaagttcttgattactgatgatcatcccaaattttgacaacaaaatcatatgtataaatttatttctcccctcttgttcatcatcttttgtaaaggtcccattgtagatcttttctgctaccaaataaaacttttcaaacaatttggtttcaagaccttaaatagacaagttggatactaagattgtgaactgataaggacatataaatttatatttccagcccttccttagagtctttatctgcatcaaaaacccaattctgccattaactgtgcttcccagtcccacctctatatgtcactcattttctgcaacaaagatctcactaaatcatgttgaaacacaagtcatgatcctctctaagtaaatagaaaaagctccctggaaaaactctgttgccacatgcacgtgccctgttactcctccagccagccagtgctgccagcattttattgtgtaaaagtccaaataaataagggcctgcatgcaacctttatcttcagaaactaggttttatatgtaaaatgtgacttgggaaatgattctgtttattaactggctgggatttttcatttctatgaaagtttcaaacatctccagtactttataaaatcccaacaattgctgtaagtcagcactttggtccactcagcccacccagcccacttgcaactctgactcttcactgaatcatatttgggaagtttgggtagggtgaggctatcttcttcaagattattttctcatatgtctgtctgtcaccttgtaaaccatgagactcctgggtatttgcatgtaacttctttgaggaagttaccaccatctctgatatagacacactttttgagttgcagtttctgttagaattttttggagactaacttgccaattctgtgaatgttattgaatatttaaaaagctgggtctgtaatgggaggcattttattagctgttgtgattgggtaacatgtccccttagatttcctgatttaaaattatacaaaattactatttttgataaaataaaggaacacctacagaaaattaagtttctaagatgtttctatacttcattagaaaagattttattactattacttatggttattggtgattaacacttaatgcgtctcctctgattttgtgttccatgaggtgcttggaacatttggagtgctctgtgcgagggacatacagtgatataggaaatttaaaaattaaaataatacccaaaacccactttatcagatatggtattgtgatggttaatattatgtgtcaacttggtgaggctatggcgcccatgtgtttggtcaaacactagcctagatgttgctgtgaatatattttgtagatgtgattaacatttacaatcagttgattttaagtaaagcagattctcatccaaaaaaaaaaaaaaaaa

SEQ ID NO: 215 - DNA, 5101 bp, Homo sapiens
agcgcagccattggtccggctactctgtctctttttcaaattgaggcgccgagtcgttgcttagtttctggggattcgggcggagacgagattagtgatttggcggctccgactggcgcgggacaaacgccacggccagagtaccgggtagagagcggggacgccgacctgcgtgcgtcggtcctccaggccacgccagcgcccgagagggaccagggagactccggcccctgtcggccgccaagcccctccgcccctcacagcgcccaggtccgcggccgggccttgattttttggcggggaccgtcatggcgtcgcagccaaattcgtctgcgaagaagaaagaggagaaggggaagaacatccaggtggtggtgagatgcagaccatttaatttggcagagcggaaagctagcgcccattcaatagtagaatgtgatcctgtacgaaaagaagttagtgtacgaactggaggattggctgacaagagctcaaggaaaacatacacttttgatatggtgtttggagcatctactaaacagattgatgtttaccgaagtgttgtttgtccaattctggatgaagttattatgggctataattgcactatctttgcgtatggccaaactggcactggaaaaacttttacaatggaaggtgaaaggtcacctaatgaagagtatacctgggaagaggatcccttggctggtataattccacgtacccttcatcaaatttttgagaaacttactgataatggtactgaattttcagtcaaagtgtctctgttggagatctataatgaagagctttttgatcttcttaatccatcatctgatgtttctgagagactacagatgtttgatgatccccgtaacaagagaggagtgataattaaaggtttagaagaaattacagtacacaacaaggatgaagtctatcaaattttagaaaagggggcagcaaaaaggacaactgcagctactctgatgaatgcatactctagtcgttcccactcagttttctctgttacaatacatatgaaagaaactacgattgatggagaagagcttgttaaaatcggaaagttgaacttggttgatcttgcaggaagtgaaaacattggccgttctggagctgttgataagagagctcgggaagctggaaatataaatcaatccctgttgactttgggaagggtcattactgcccttgtagaaagaacacctcatgttccttatcgagaatctaaactaactagaatcctccaggattctcttggagggcgtacaagaacatctataattgcaacaatttctcctgcatctctcaatcttgaggaaactctgagtacattggaatatgctcatagagcaaagaacatattgaataagcctgaagtgaatcagaaactcaccaaaaaagctcttattaaggagtatacggaggagatagaacgtttaaaacgagatcttgctgcagcccgtgagaaaaatggagtgtatatttctgaagaaaattttagagtcatgagtggaaaattaactgttcaagaagagcagattgtagaattgattgaaaaaattggtgctgttgaggaggagctgaatagggttacagagttgtttatggataataaaaatgaacttgaccagtgtaaatctgacctgcaaaataaaacacaagaacttgaaaccactcaaaaacatttgcaagaaactaaattacaacttgttaaagaagaatatatcacatcagctttggaaagtactgaggagaaacttcatgatgctgccagcaagctgcttaacacagttgaagaaactacaaaagatgtatctggtctccattccaaactggatcgtaagaaggcagttgaccaacacaatgcagaagctcaggatatttttggcaaaaacctgaatagtctgtttaataatatggaagaattaattaaggatggcagctcaaagcaaaaggccatgctagaagtacataagaccttatttggtaatctgctgtcttccagtgtctctgcattagataccattactacagtagcacttggatctctcacatctattccagaaaatgtgtctactcatgtttctcagatttttaatatgatactaaaagaacaatcattagcagcagaaagtaaaactgtactacaggaattgattaatgtactcaagactgatcttctaagttcactggaaatgattttatccccaactgtggtgtctatactgaaaatcaatagtcaactaaagcatattttcaagacttcattgacagtggccgataagatagaagatcaaaaaaaggaactagatggctttctcagtatactgtgtaacaatctacatgaactacaagaaaataccatttgttccttggttgagtcacaaaagcaatgtggaaacctaactgaagacctgaagacaataaagcagacccattcccaggaactttgcaagttaatgaatctttggacagagagattctgtgctttggaggaaaagtgtgaaaatatacagaaaccacttagtagtgtccaggaaaatatacagcagaaatctaaggatatagtcaacaaaatgacttttcacagtcaaaaattttgtgctgattctgatggcttctcacaggaactcagaaattttaaccaagaaggtacaaaattggttgaagaatctgtgaaacactctgataaactcaatggcaacctggaaaaaatatctcaagagactgaacagagatgtgaatctctgaacacaagaacagtttatttttctgaacagtgggtatcttccttaaatgaaagggaacaggaacttcacaacttattggaggttgtaagccaatgttgtgaggcttcaagttcagacatcactgagaaatcagatggacgtaaggcagctcatgagaaacagcataacatttttcttgatcagatgactattgatgaagataaattgatagcacaaaatctagaacttaatgaaaccataaaaattggtttgactaagcttaattgctttctggaacaggatctgaaactggatatcccaacaggtacgacaccacagaggaaaagttatttatacccatcaacactggtaagaactgaaccacgtgaacatctccttgatcagctgaaaaggaaacagcctgagctgttaatgatgctaaactgttcagaaaacaacaaagaagagacaattccggatgtggatgtagaagaggcagttctggggcagtatactgaagaacctctaagtcaagagccatctgtagatgctggtgtggattgttcatcaattggcggggttccatttttccagcataaaaaatcacatggaaaagacaaagaaaacagaggcattaacacactggagaggtctaaagtggaagaaactacagagcacttggttacaaagagcagattacctctgcgagcccagatcaacctttaattcacttgggggttggcaattttatttttaaagaaaacttaaaaataaaacctgaaaccccagaacttgagccttgtgtatagattttaaaagaatatatatatcagccgggcgcggtggctcatgcctgtaatcccagcactttgggaggctgaggcgggtggattgcttgagcccaggagtttgagaccagcctggccaacgtggcaaaacctcgtctctgttaaaaattagccgggcgtggtggcacactcctgtaatcccagctactggggaggctgaggcacgagaatcacttgaacccaggaagcggggttgcagtgagccaaaggtacaccactacactccagcctgggcaacagagcaagactcggtctcaaaaacaaaatttaaaaaagatataaggcagtactgtaaattcagttgaattttgatatctacccatttttctgtcatccctatagttcactttgtattaaattgggtttcatttgggatttgcaatgtaaatacgtatttctagttttcatataaagtagttcttttataacaaatgaaaagtatttttcttgtatattattaagtaatgaatatataagaactgtactcttctcagcttgagcttacataggtaaatatcaccaacatctgtccttagaaaggaccatctcatgttttttttcttgctatgacttgtgtattttcttgcatcctccctagacttccctatttcgctttctcctcggctcactttctccctttttatttttcaccaaaccatttgtagagctacaaaaggtatcctttcttattttcagtagtcagaattttatctagaaatcttttaacacctttttagtggttatttctaaaatcactgtcaacaataaatctaaccctagttgtatccctcctttcagtatttttcacttgttgccccaaatgtgaaagcatttcattcctttaagaggcctaactcattcaccctgacagagttcacaaaaagcccacttaagagtatacattgctattatgggagaccacccagacatctgactaatggctctgtgcccacactccaagacctgtgccttttagagaagctcacaatgatttaaggactgtttgaaacttccaattatgtctataatttatattcttttgtttacatgatgaaactttttgttgttgcttgtttgtatataatacaatgtgtacatgtatctttttctcgattcaaatcttaacccttaggactctggtatttttgatctggcaaccatatttctggaagttgagatgtttcagcttgaagaaccaaaacagaaggaatatgtacaaagaataaattttctgctcacgatgagtttagtgtgtaaagtttagagacatctgactttgatagctaaattaaaccaaaccctattgaagaattgaatatatgctacttcaagaaactaaattgatctcgtagaattatcttaataaaataatggctataatttctctgcaaaatcagatgtcagcataagcgatggataatacctaataaactgccctcagtaaatccatggttaataaatgtggtttctacattaaaaaaaaaaaaaaaaaaaaaaaaa

SEQ ID NO: 216 - DNA, 2586 bp, Homo sapiens
gcaagctgggcggaaccggaagatggtgtgagccacgggctgccgggggcctggggctcggcgtcggtccccgggggatgtggagagctggcagcatgtcggccgagctgggagtcgggtgcgcattgcgggcggtgaacgagcgcgtgcagcaggctgtggcgcggcggccgcgggatctcccagccatccagccccggctagtggcggtcagcaaaaccaaacctgcagacatggtgatcgaggcctatggacatgggcagcgcacttttggcgagaactacgttcaggaactgctagaaaaagcatcaaatcccaaaattctgtctttgtgtcctgagatcaaatggcacttcattggccacctacagaaacaaaatgtcaacaaattgatggctgtccccaatctcttcatgctggaaacagtggattctgtgaagttggcagacaaagtgaacagttcctggcagagaaaaggttctcctgaaaggttaaaggttatggtccagattaacaccagcggagaagagagtaaacatggccttccaccttcagagaccatagccatcgtggagcacataaacgccaagtgtcctaacctggagtttgtggggctgatgaccataggaagctttgggcatgatcttagtcaaggaccaaatccagacttccagctgttattgtccctccgggaggagctgtgtaaaaagctgaacatccctgctgaccaggttgagctgagcatgggcatgtccgcggatttccagcatgcggttgaagtaggatctacaaatgtccgaataggaagcacgatttttggagagcgggattactcaaagaaacccaccccggacaagtgcgcagcagacgtgaaggccccgctggaggtggcacaggagcactgagccagggaatactgagagcactaactatgcactaacctagattttcatttcgatattccctgtgtcccagcgcagtcctgctctcctgtgacctgtggagagcactaatgatcacgtgtgttgatggaaaccatctgtgcttagtctctgacataggaagcttgcttcaggcaatggctttggattgagtttgagaaattcaaacatttctgcagaacagataccaaatcaatagctaggaatcatgttcaatattgaattctgcccaggagcatgaactgatccatgaatgccttttccaggttaaaatttggtcactgatgcctataatcgtggaagtcagagggattcccctttttcatctcattttaataggaaaattccttatggttaacatctccctacaaactcctactacgtcgtctaaattgctgctctggaataaggtgatttctgcccccagattcttccctagccggtagatacgtgaagatattcccaactgtggaatggcagtgtaggtagcttcaggaaatggctcaggttaattctcaaaacacaaattgttgctggccaggcatggtgactcatgcctgtaatcccagcaatttgggagacagaggcggaaggatcacctgagcctaggagttcaagaccagcctcagcaacagcaggagccccaccccccgtctctacaaaaaaatttaaaaattaactgggcatggtggctgaggtggaagaatggaagaatcacttgagcccaggagtttgaggctgcagtgagctatgattgcaccactgtactcctgccttaaaaaaaaaaaaaaaatcccaatagtccatgaaggctttgatctcttgggaagttcttcatagatgctgtcacatttcttaaagcaaccttttaatatgcagataataccccccaacttttttagagacagcctgtctcttaaaaaaaaaattaatttggtagtgagagcttgtgtcactgccactctgttttatccctgaaattaaaggataacataaggaggacttgggcctttctgacatcatcctgaagagacaggactttgcgtttttcctctgggacctacagtgatgagaatttaatgattatctcctccactataatcctctttagggtgattttttaaatcaaaacccagtgaatctcattactcctaagaaacgaaagattccttcaaagccttttcaggcacatggtttcaacaaagcctggctttgacattccttgtcctgaggagcactttccaggcatagttacagcttccccactgtatttacaagccagaattgtgcaactcttctggatcattaataaagtagcaagatcctcaaaaaacccaaaaacaccattctctaatagtcatgacaaatggcttcagtatggcttgttttttattttccagatggctttttctcttattttttgaagccccagtctttgattttacaggtaactttcaaaacatcatgatgctgccaaatgtacttttgtaaacttaaacattatgattcctgtattatttcagtgagagctacagtgtgatatttcagagtctattaaataaaaatgtgagtttgaattacaccatctgtgccaattacaaagcaattaaaagatttattttttatgaaaaaaaaaaaaaaaaaa

SEQ ID NO: 217 - DNA, 4959 bp, Homo sapiens
cccccacacaccccagccgaggcccggaaggggccaggcgcgcttccgtctccgccggggatgcacggagggcggagctgcggcccgaggacgcgacgcgagcccagttccggcgaggaggccgcgccagtgacagcgatggcggcggagtcggcgctccaagttgtggagaagctgcaggcgcgcctggccgcgaacccggaccctaagaagctattgaaatatttgaagaaactctccaccctgcctattacagtagacattcttgcggagactggggttgggaaaacagtaaatagcttgcgaaaacacgagcatgttggaagctttgccagggacctagtggcccagtggaagaagctggttcctgtggaacgaaatgctgagcctgatgaacaggactttgagaagagcaattcccgaaagcgccctcgggatgccctgcagaaggaggaggagatggagggggactaccaagaaacctggaaagccacggggagccgatcctatagccctgaccacaggcagaagaaacataggaaactctcggagctcgagagacctcacaaagtgtctcacggtcatgagaggagagatgagagaaagaggtgtcacagaatgtcaccaacttactcttcagaccctgagtcttctgattatggccatgttcaatcccctccatcttgtaccagtcctcatcagatgtacgtcgaccactacagatccctggaggaggaccaggagcccattgtttcacaccagaagcctgggaaaggccacagcaatgcctttcaggacagactcggggccagccaagaacgacacctgggtgaaccccatgggaaaggggttgtgagtcaaaacaaggagcacaaatcttcccacaaggacaaacgccccgtggatgccaagagtgatgagaaggcctctgtggtgagcagagagaaatcacacaaggccctctccaaagaggagaaccgaaggccaccctcaggggacaatgcaagggagaaaccgccctctagtggcgtaaagaaagagaaggacagagagggcagcagcctgaagaagaagtgtttgcctccctcagaggccgcttcagacaaccacctgaaaaagccaaagcacagagacccagagaaagccaaattggacaaaagcaagcaaggtctggacagctttgacacaggaaaaggagcaggagacctgttgcccaaggtaaaagagaagggttctaacaacctaaagactccagaagggaaagtcaaaactaatttggatagaaagtcactgggctccctccctaaagttgaggagacagatatggaggatgaattcgagcagccaaccatgtcttttgaatcctacctcagctatgaccagccccggaagaaaaagaaaaagattgtgaaaacttcagccacggcacttggagataaaggacttaaaaaaaatgactctaaaagcactggtaaaaacttggactcagttcagaaattacccaaggtgaacaaaaccaagtcagagaagccggctggagctgatttagccaagctgagaaaggtgcctgatgtgttgccagtgttgccagacctcccgttacccgcgatacaggccaattaccgtccactgccttccctcgagctgatatcctccttccagccaaagcgaaaagcgttctcttcaccccaggaagaagaagaagctggatttactgggcgcagaatgaattccaagatgcaggtgtattctggttccaagtgtgcctatctccctaaaatgatgaccttgcaccagcaatgcatccgagtacttaaaaacaacatcgattcaatctttgaagtgggaggagtcccatactctgttcttgaacccgttttggagaggtgtacacctgatcagctgtatcgcatagaggaatacaatcatgtattaattgaagaaacagatcaattatggaaagttcattgtcaccgagactttaaggaagaaagacccgaagagtatgagtcgtggcgagagatgtacctgcggcttcaggacgcccgagagcagcggctacgagtactaacaaagaatatccagttcgcacatgccaataagcccaaaggccgacaagcaaagatggcctttgtcaactctgtggccaagccacctcgtgacgtccggaggaggcaggaaaagtttggaacgggaggagcagctgtccctgagaaaatcaagatcaagccagccccgtaccccatgggaagcagccatgcttccgccagtagcatcagctttaaccccagccctgaggagccggcctatgatggcccaagcaccagcagtgcccacttggcaccagtggtcagcagcactgtttcctatgatcctaggaaacccactgtgaagaaaattgccccaatgatggccaagacaattaaagctttcaagaacagattctcccgacgataaactgaggacttgccttggaaatggaatctggggaggcaggaatacaaggacagtgggggttggggaatggaattctacaggagactggagtcttgctttgtggatccttttggtctccgagtcctgcagtctgcaggtgctgcccctgggaacctgcgtgccacagccccgcctccctgcctggagcacactttagaattctgaagatgtgaagcctctgtctcactgaggattttaaaggtcaattatacttttgttgttcattagcatctttgtaaactataagacgtagttttaattaataaatattgcccccagattgtatttatattatcccccaggtttgtttttgttttttgtcctctaccacacatttagccttttatcttccaggtccttattaaaatcagatgaaagcctagtgaaagccagtctcctgccccagctcagctctgtgtggactctggtccagacagaggactgggcatctccagagcctgcacagtacctgctgcacgtagggcaaggaatgagcactagaccgcctgtccccaagggagcctcagtggggcgacagggtgctcggcggactccacctcaggccctccccactgttgctgtgcattcctgtgcaggtgcatctctttcttactaactggtatttattaagggaggtgctctgtaggtctggagcctttccctcatcctttttgcgagtccccacctttttgtttttttttttttctttgaggctcactagaggacgcagaaccttgggagattgatttgcacagaactccccacctcccacttttacaatttccagtttctgattgaaaattttagggtttctccccactgcccttccctatctttccttcccctcaacaccatgaaggaaaaacacacacggcagggctttttgtagccctgaaggcaactttagacatttaaaatccagcactttaatctcttgttctctgtgaatcactatgagaagtgaatggttttaaaggctgtaatgctatgttggaaattggtttgttttgccttttattgaaaaggtaagatcatgtgattggaagaacacaactgttggcttgggaagaggactttgctgctgaagtgttttctaccttctgagtgtgtttaaggcaggatttggagggaaggaccagcttagggagagtgtctgagccacagcgtcaggatgggggaaaccacatgggatccatcaagttccagttgaacaggagcaagatcagaacttaggagggcagtgtcagctcccttgttggctgtcaaggaacaccgatctagtagaaacccacttggttgtgacccaggtagaggtagatgccatacatttgagatatgcgtccttaaggaacctgacaagcagactgaagggatggtaagtgtgacagcctgataagttttctcaaagcccaggatacagagccagtgttttctgtaactggagacctcagttaggccaacttcgaattccagagcaacgtaggaagtctattcagcagaaactcgacattgttcagtgtgtattgctgtgcagggtgcctattgtgacaggacacaaatgttactatgttttaatttgctatatttttgaatgggtaaagcattactttacttctcttggttacttgtaccaccattccacccctatccctagcctgccccacaaatctaatattaggaagcctcttaactgaaaccaaatgaacatttgggtcaggtgccagatgtctgctgcctagaatagctttttctaggtgtctaccaccttgaatttatctcttaactgtgtgttcaagtctttgtcattgaaactagtttttcatatcttagattcagttgtgtatgatttaatgtcccttattaggagtctttaggcagggagggaagaaaaaacagatttgttcatagcaatgtcagtatccattttggcacataaagatttttgatgagccctgtttgcatagagccagatgttttcccctcccccaagagtatctacatcagggatgtgacttggtgcgaagagtcaggggaaagaggaaaaacccaatttctaaatgacctccttgcccagcttactaaaatggctgcagagcagacacaggatgaatttgaacctgacacaggatgaatttgaacctttggtctcatttatggaaaaacttgtgcaattttttttctgtgctacactacatacaaatcaccaaattacaaattacccttttgtgatccttggtgtactgagcagtttctttggggctttttctttctgggaagcgggagggaaaggagcaaggtgtcatcctgctcttcatttgtattttggtcccaaaatgtaaatacaattttctatgttacttttttgtggtaactaccgagatgaatattttaattagataagttatatgaaaaggaaaattccatgtctaaataaaaaacaaactccaaaaaaaaaaaaaaaaa

SEQ ID NO: 218 - DNA, 1568 bp, Homo sapiens
agttgttgttgaggtggcgcggcgctaagatggcggcggcggcggcggcggccgtggcgggggtggggcgcggtggcggtggcgcggagccacggcaggagcggagccgggcccggggctgggccggcgtcgaacgcagcgaaggccggaggatggaaccaggtgaggagctggaagaggagggctctccaggtggccgtgaggatggcttcaccgccgagcacctggctgcagaggccatggcagctgacatggacccctggctagtgtttgatgcccgcacaacgcctgccactgagctggatgcctggctggccaagtacccaccatcccaagttacccgctatggggaccccggttcacccaactcagagcctgtgggctggattgcagtgtatgggcagggctacagccccaactccggggacgtgcagggcctgcaggcagcctgggaagctctgcagaccagtgggcggcccatcacaccgggtaccctgcgccagctcgccatcacccaccacgtgctctcgggcaagtggcttatgcatctggcaccgggcttcaagctggaccacgcctgggctggcattgcccgggccgtggttgaaggccagcttcaggtggccaaggtgagcccacgtgccaaggagggtgggcgccaggtcatctgtgtttacacggacgacttcacggaccgcttgggtgtactggaggcggattcagccatccgtgcagcgggcattaagtgcctgctcacctacaagcctgatgtctacacctacctgggcatctaccgggccaatcgctggcacctctgccccactctctatgagagccgtttccagcttgggggtagtgcccgtggctcccgagtgcttgaccgtgccaacaacgtggaactgacctagaggggccaaattggggagactgcccactcccccctccatgctggggttggatcctcctgtcttcctccttgtcccatgaaggccacaccccccagctctggggactcctaggtcacttgggaactacctgcatcttcagtccccttgaacttctgccctctgttcagggctgacacaagccccacaggctggggggctccggttccctgagggatgagccttcagcctccctttgtaatgctgctcctctccactgcccagcaccatgagttgggtgcagacacctagaaggagagacttcttggaacgctcatcccccgctatacctccccttcctcctgcatctccccttctttccttccccctcaggagagagaaaacttagtgcttccagcccttcttggagccttcatggtccaggggtaggggccccactggcctgagcatgccattttgaggggagggtagttgtgcctacttatcccctggcagaggggatgccaggaccatggacatgaggcttgcccatccctgccaacttacacagcctgtaccactgtccccccttccttggctactttgacatgtgcctgctcctggcatttcaataaaacccggcttgggtctgtgtcttgagtgttttttaaaaaaaaaaaaaaa

SEQ ID NO: 219 - DNA, 3935 bp, Homo sapiens
tacaacacaggctccagtatataaatcaggcaaattccccatttgagcatgaacctctgaaaactgccggcatctgaggtttcctccaaggccctctgaagtgcagcccataatgaaggtcttggcggcaggagttgtgcccctgctgttggttctgcactggaaacatggggcggggagccccctccccatcacccctgtcaacgccacctgtgccatacgccacccatgtcacaacaacctcatgaaccagatcaggagccaactggcacagctcaatggcagtgccaatgccctctttattctctattacacagcccagggggagccgttccccaacaacctggacaagctatgtggccccaacgtgacggacttcccgcccttccacgccaacggcacggagaaggccaagctggtggagctgtaccgcatagtcgtgtaccttggcacctccctgggcaacatcacccgggaccagaagatcctcaaccccagtgccctcagcctccacagcaagctcaacgccaccgccgacatcctgcgaggcctccttagcaacgtgctgtgccgcctgtgcagcaagtaccacgtgggccatgtggacgtgacctacggccctgacacctcgggtaaggatgtcttccagaagaagaagctgggctgtcaactcctggggaagtataagcagatcatcgccgtgttggcccaggccttctagcaggaggtcttgaagtgtgctgtgaaccgagggatctcaggagttgggtccagatgtgggggcctgtccaagggtggctggggcccagggcatcgctaaacccaaatgggggctgctggcagaccccgagggtgcctggccagtccactccactctgggctgggctgtgatgaagctgagcagagtggaaacttccatagggagggagctagaagaaggtgccccttcctctgggagattgtggactggggagcgtgggctggacttctgcctctacttgtccctttggccccttgctcactttgtgcagtgaacaaactacacaagtcatctacaagagccctgaccacagggtgagacagcagggcccaggggagtggaccagcccccagcaaattatcaccatctgtgcctttgctgccccttaggttgggacttaggtgggccagaggggctaggatcccaaaggactccttgtcccctagaagtttgatgagtggaagatagagaggggcctctgggatggaaggctgtcttcttttgaggatgatcagagaacttgggcataggaacaatctggcagaagtttccagaaggaggtcacttggcattcaggctcttggggaggcagagaagccaccttcaggcctgggaaggaagacactgggaggaggagaggcctggaaagctttggtaggttcttcgttctcttccccgtgatcttccctgcagcctgggatggccagggtctgatggctggacctgcagcaggggtttgtggaggtgggtagggcaggggcaggttgctaagtcaggtgcagaggttctgagggacccaggctcttcctctgggtaaaggtctgtaagaaggggctggggtagctcagagtagcagctcacatctgaggccctgggaggccttgtgaggtcacacagaggtacttgagggggactggaggccgtctctggtccccagggcaagggaacagcagaacttagggtcagggtctcagggaaccctgagctccaagcgtgctgtgcgtctgacctggcatgatttctatttattatgatatcctatttatattaacttattggtgctttcagtggccaagttaattcccctttccctggtccctactcaacaaaatatgatgatggctcccgacacaagcgccagggccagggcttagcagggcctggtctggaagtcgacaatgttacaagtggaataagccttacgggtgaagctcagagaagggtcggatctgagagaatggggaggcctgagtgggagtggggggccttgctccacccccccccatcccctactgtgacttgctttagggtgtcagggtccaggctgcaggggctgggccaatttgtggagaggccgggtgcctttctgtcttgattccagggggctggttcacactgttcttgggcgccccagcattgtgttgtgaggcgcactgttcctggcagatattgtgccccctggagcagtgggcaagacagtccttgtggcccaccctgtccttgtttctgtgtccccatgctgcctctgaaatagcgccctggaacaaccctgcccctgcacccagcatgctccgacacagcagggaagctcctcctgtggcccggacacccatagacggtgcggggggcctggctgggccagaccccaggaaggtggggtagactggggggatcagctgcccattgctcccaagaggaggagagggaggctgcagatgcctgggactcagaccaggaagctgtgggccctcctgctccacccccatcccactcccacccatgtctgggctcccaggcagggaacccgatctcttcctttgtgctggggccaggcgagtggagaaacgccctccagtctgagagcaggggagggaaggaggcagcagagttggggcagctgctcagagcagtgttctggcttcttctcaaaccctgagcgggctgccggcctccaagttcctccgacaagatgatggtactaattatggtacttttcactcactttgcacctttccctgtcgctctctaagcactttacctggatggcgcgtgggcagtgtgcaggcaggtcctgaggcctggggttggggtggagggtgcggcccggagttgtccatctgtccatcccaacagcaagacgaggatgtggctgttgagatgtgggccacactcacccttgtccaggatgcagggactgccttctccttcctgcttcatccggcttagcttggggctggctgcattcccccaggatgggcttcgagaaagacaaacttgtctggaaaccagagttgctgattccacccggggggcccggctgactcgcccatcacctcatctccctgtggacttgggagctctgtgccaggcccaccttgcggccctggctctgagtcgctctcccacccagcctggacttggccccatgggacccatcctcagtgctccctccagatcccgtccggcagcttggcgtccaccctgcacagcatcactgaatcacagagcctttgcgtgaaacagctctgccaggccgggagctgggtttctcttccctttttatctgctggtgtggaccacacctgggcctggccggaggaagagagagtttaccaagagagatgtctccgggcccttatttattatttaaacatttttttaaaaagcactgctagtttacttgtctctcctccccatcgtccccatcgtcctccttgtccctgacttggggcacttccaccctgacccagccagtccagctctgccttgccggctctccagagtagacatagtgtgtggggttggagctctggcacccggggaggtagcatttccctgcagatggtacagatgttcctgccttagagtcatctctagttccccacctcaatcccggcatccagccttcagtcccgcccacgtgctagctccgtgggcccaccgtgcggccttagaggtttccctccttcctttccactgaaaagcacatggccttgggtgacaaattcctctttgatgaatgtaccctgtggggatgtttcatactgacagattatttttatttattcaatgtcatatttaaaatatttattttttataccaaatgaatacttttttttttaagaaaaaaaagagaaatgaataaagaatctactcttgaaaaaaaaaaaaaaaa

SEQ ID NO: 220 - DNA, 2396 bp, Homo sapiens
ttcgcggtgccaccgccccgcccacgcctcctcgccggcctccgagtgcgtcacgtgacgggtcggtggcgctggcggttgctgtcagctgattcccggggttggtggcagcggcggtagcagcaatggactttctcctggggaacccgttcagctctccagtgggacagcgcatcgagaaagccacagatggctccctgcagagcgaggactgggccctcaacatggagatctgcgacatcatcaacgagacggaggaaggtcccaaagatgccctccgagcagtaaagaagagaatcgtggggaataagaacttccacgaggtgatgctggctctcacagtcttagaaacctgtgtcaagaactgcgggcaccgcttccacgtgctggtggccagccaggacttcgtggagagtgtgctggtgaggaccatcctgcccaagaacaacccacccaccatcgtgcatgacaaagtgctcaacctcatccagtcctgggctgacgcgttccgcagctcgcccgatctgacaggtgtggtcaccatctatgaggacctgcggaggaaaggcctggagttccccatgactgacctggacatgctgtcacccatccacacaccccagaggaccgtgttcaactcagagacacaatcaggacaggattctgtgggcactgactccagccagcaagaggactctggccagcatgctgcccctctgcccgccccgcccatactctccggtgacacgcccatagcaccaaccccggaacagattgggaagctgcgcagtgagctggagatggtgagtgggaacgtgagggtgatgtcggagatgctgacggagctggtgcccacccaggccgagcccgcagacctggagctgctgcaggagctcaaccgcacgtgccgagccatgcagcagcgggtcctggagctcatccctcagatcgccaatgagcagctgacagaggagctgctcatcgtcaatgacaatctcaacaatgtgttcctgcgccatgaacggtttgaacggttccgaacaggccagaccaccaaggccccaagtgaggccgagccggcagctgacctgatcgacatgggccctgacccagcagccaccggcaacctctcatcccagctggcaggaatgaacctgggctccagcagtgtgagagctggcctgcagtctctggaggcctctggtcgactggaagatgagtttgacatgtttgcgctgacacggggcagctcactggctgaccaacggaaagaggtaaaatacgaagccccccaagcaacagacggcctggctggagccctggacgcccggcagcagagcactggcgcgatcccagtcacccaggcctgcctcatggaggacatcgagcagtggctgtccactgacgtgggtaatgatgcggaagagcctaagggggtcaccagcgaagaatttgacaaattcctggaagaacgggccaaagccgcggaccgattgcccaacctctccagcccctcagctgaggggcccccgggtcccccatctggcccagcgccccggaagaagacccaggagaaagatgatgacatgctgtttgccttatgagtgtggggtctggcaccctgcagcccaggtccccactgctctcacacccttaggctgggacctccctccctcctctggtgttaaggctgctttgggggtggcttgttacccccttttcctcctctttgaagacggagctgccccagctgtggctgggggtgtggaggcagtgggatgaactgggggacaggtctgcgctgcagtgggatctggctgctctgcctcctttcccaccccagctgaccatgagactttgctgagaagtggaggccccaggacaggctggctggctggctggctgcttgacccagtgtgactctccttcactgagtgataccctgctccgggcccatgccccaaggagcccttcagagcccacactgccagtcgaggcctggctggaggctggccacagtggaaattctgccgagcctcttgtcccttccctgctctgctgcatggggccccatggctttggctggccactgagggtagggtgtggaggtgtggaggccccctgaggagctgcggcggcccaggtacgaagctgcaactctgcgcgcagtgggcgagatctcatcagccccaggctgcaggtgaggcttcaggggatgctggggccccactgcccctccgctgccttgccctccatccttcctctgttccttctggccgggcaccacagcactggggctcacctcttggttgatcctcttgtactgggagaggtgccttttgtatccccaattaaaggtagaaaaccaccctgctagcagcattgtcaaaaaaaaa

SEQ ID NO: 221 - DNA, 5484 bp, Homo sapiens
ccgttctgagccgagccggaaccctagcccgagacggagccggggcccgggccggcgccattgcgcgggcgccgcgggaagaccttggcgcggggcggcgggccgggccaggccatgcgggccgagtgagccggcgcccgcagcccgcggcgcggcatggcttccccgcggagctccgggcagcccgggccgccgccgccgccgccaccgccgcccgcgcgcctgctactgctactgctgctgccgctgctgctgcctctggcgcccggggcctggggctgggcgcggggcgccccccggccgccgcccagcagcccgccgctctccatcatgggcctcatgccgctcaccaaggaggtggccaagggcagcatcgggcgcggtgtgctccccgccgtggaactggccatcgagcagatccgcaacgagtcactcctgcgcccctacttcctcgacctgcggctctatgacacggagtgcgacaacgcaaaagggttgaaagccttctacgatgcaataaaatacgggcctaaccacttgatggtgtttggaggcgtctgtccatccgtcacatccatcattgcagagtccctccaaggctggaatctggtgcagctttcttttgctgcaaccacgcctgttctagccgataagaaaaaatacccttatttctttcggaccgtcccatcagacaatgcggtgaatccagccattctgaagttgctcaagcactaccagtggaagcgcgtgggcacgctgacgcaagacgttcagaggttctctgaggtgcggaatgacctgactggagttctgtatggcgaggacattgagatttcagacaccgagagcttctccaacgatccctgtaccagtgtcaaaaagctgaaggggaatgatgtgcggatcatccttggccagtttgaccagaatatggcagcaaaagtgttctgttgtgcatacgaggagaacatgtatggtagtaaatatcagtggatcattccgggctggtacgagccttcttggtgggagcaggtgcacacggaagccaactcatcccgctgcctccggaagaatctgcttgctgccatggagggctacattggcgtggatttcgagcccctgagctccaagcagatcaagaccatctcaggaaagactccacagcagtatgagagagagtacaacaacaagcggtcaggcgtggggcccagcaagttccacgggtacgcctacgatggcatctgggtcatcgccaagacactgcagagggccatggagacactgcatgccagcagccggcaccagcggatccaggacttcaactacacggaccacacgctgggcaggatcatcctcaatgccatgaacgagaccaacttcttcggggtcacgggtcaagttgtattccggaatggggagagaatggggaccattaaatttactcaatttcaagacagcagggaggtgaaggtgggagagtacaacgctgtggccgacacactggagatcatcaatgacaccatcaggttccaaggatccgaaccaccaaaagacaagaccatcatcctggagcagctgcggaagatctccctacctctctacagcatcctctctgccctcaccatcctcgggatgatcatggccagtgcttttctcttcttcaacatcaagaaccggaatcagaagctcataaagatgtcgagtccatacatgaacaaccttatcatccttggagggatgctctcctatgcttccatatttctctttggccttgatggatcctttgtctctgaaaagacctttgaaacactttgcaccgtcaggacctggattctcaccgtgggctacacgaccgcttttggggccatgtttgcaaagacctggagagtccacgccatcttcaaaaatgtgaaaatgaagaagaagatcatcaaggaccagaaactgcttgtgatcgtggggggcatgctgctgatcgacctgtgtatcctgatctgctggcaggctgtggaccccctgcgaaggacagtggagaagtacagcatggagccggacccagcaggacgggatatctccatccgccctctcctggagcactgtgagaacacccatatgaccatctggcttggcatcgtctatgcctacaagggacttctcatgttgttcggttgtttcttagcttgggagacccgcaacgtcagcatccccgcactcaacgacagcaagtacatcgggatgagtgtctacaacgtggggatcatgtgcatcatcggggccgctgtctccttcctgacccgggaccagcccaatgtgcagttctgcatcgtggctctggtcatcatcttctgcagcaccatcaccctctgcctggtattcgtgccgaagctcatcaccctgagaacaaacccagatgcagcaacgcagaacaggcgattccagttcactcagaatcagaagaaagaagattctaaaacgtccacctcggtcaccagtgtgaaccaagccagcacatcccgcctggagggcctacagtcagaaaaccatcgcctgcgaatgaagatcacagagctggataaagacttggaagaggtcaccatgcagctgcaggacacaccagaaaagaccacctacattaaacagaaccactaccaagagctcaatgacatcctcaacctgggaaacttcactgagagcacagatggaggaaaggccattttaaaaaatcacctcgatcaaaatccccagctacagtggaacacaacagagccctctcgaacatgcaaagatcctatagaagatataaactctccagaacacatccagcgtcggctgtccctccagctccccatcctccaccacgcctacctcccatccatcggaggcgtggacgccagctgtgtcagcccctgcgtcagccccaccgccagcccccgccacagacatgtgccaccctccttccgagtcatggtctcgggcctgtaagggtgggaggcctgggcccggggcctcccccgtgacagaaccacactgggcagaggggtctgctgcagaaacactgtcggctctggctgcggagaagctgggcaccatggctggcctctcaggaccactcggatggcactcaggtggacaggacggggcagggggagacttggcacctgacctcgagccttatttgtgaagtccttatttcttcacaaagaagaggaacggaaatgggacgtcttccttaacatctgcaaacaaggaggcgctgggatatcaaacttgcaaaaaaaaaaaaaaaaaaaaaaaaacaaaaaaactagacaaggagagaggcactagaactccagctggaagtcacggagtggctcgagcagccttgggaagaggcaaggagcttctgaagaaactgcctctgcacacacatcactggctgtgacccctcaggctagcccttctccactctgggggaggaggtgggaagggccaccaggcccccagctgccaggccagctgaccccagccttcctggaacagggagtctgcaggagcgcagacaggcacagccctggagcaggcaggccgagggctgcggcactggagcaggctgacttacatgctccacatgggacctgtgtcacccaatgagatgtttgttactctggtaaatgccacacgttaacacaataacacccattcctgggaccgtggggatttagggcacgtcactgcagacacgctctgcagcattcaccgacagtctgtcatgcacccaccacgttggccatgtccttgtgttcctatcggatgctcccagtaaccagggggaccacccgagctaatcatggaatgtctgttcccagcaaacacgataaagaaagattgtgcactttaacctctctcatcagggcccaagggctggctgggattttttttttttttttcccactaactttgtttctgaccaaagtgaattggaggcactctgctaaaagacatccccgtagacataggggagagagttgctggctgagggcttcccttggcttccagaaggcagccttccatccagacaagccagtgagctctccccttgggatcactggggtgatcagtcagcagattgattctcattcataagatcattcctccctttaaattgagcccctaagagcactggcctgggagtcagacagacctgggttcaagtcctcagtcccctgcccactccctacgtgactttgatcaggtcactagtgtctctctgagcctcagtttcccctctgtaacttggggttgaactaaaacacctgtcctgcctacctcacaaggtcactctgaggattgaaacttgatcttgtccaggaaagctttgtaccaaacagtgaagccgccctgatccgtgaggtatgagtatgactctgaccttcagccctccctacagccgggggtgtggcccagagaagcttccagcacagccctctacccagaacatccgggctggagggaggctcccagtgacttttctgacattcctagacaggttcattctttgctcaagaaaggcctgaatgacaatgtccaggatgtctgcacaactgagcagctcgctcactccctaaagaaacctattggcagcttcaacaggcaggcaataatctcttcccagaaccactgcagtcaggaataaactgttttctccaccaggctttgacaaaagggcccacaggaatcttaccaatgccaacatttcaaagcaccctatttcacgtagcatagctttctgctccccttccccaaagagaggttatggaggtactgtagcttttagggaaaaaaaaatgttaacacatcacaggtcaagttgaagtcattctctgtttaggcactaaaaatcggtgttgtcactcactgtgtattaccagtatttacttgctttcttgatttcaccaaaaccaaatttaatttaaaggaccacattaatttttcaaagggaaagagacaattaattgtacataatgtatacacacacacaaaaaaaaatacctgtagaaatattattccagcatagcaggaaaacaaacaaaagtattggactgtcggaggtgagcctgtgcgtctgtaaccctttgtgactcctgagcgtgcgctgtcttctaggttaactcacgaagtacattctctgtcttactgatactgtaggttcacccatttttttttaatttcctcgcaaataacaagacccacagaagtgactctagctacttaatggttctgttcttttatatgcagcaaacacaccgtccatttctgaagaggcttcggcctgaaggcattttccaatgatgttagtgcacaaaacgctttaaattagactggaactgccagaatcaaatgtaaatgaggaatttctcgtacccctactgcatggtatcgatttttaataaattgttgcaaatttgtttttatgaataaaaggaaaaaacctgtcgtctttaa

SEQ ID NO: 222 - DNA, 4547 bp, Homo sapiens
ataattcgaataccagggcaggccgagccagccgtgcgccgcgctccagggcccagggcgccgcacacgcacccacccacccacccagcctcgcagcgccatgggcaagaacaagcagccacgcggccagcagaggcaggggggcccgccggccgcggacgccgctgggcccgacgacatggagccgaagaagggcacgggggcccccaaggagtgcggggaggaggagccccggacctgctgcggctgccggttcccgctgctgctcgccctgctgcagctggccctgggcatcgccgtgaccgtggtgggcttcctcatggcgagcatcagctcctccctgctagtcagggacactccattttgggctgggatcattgtctgcttagtggcctatcttggcttgtttatgctttgtgtctcatatcaggttgacgaacggacatgtattcaattttctatgaaactgttatactttctgctgagtgccctgggcctgacggtctgtgtgctggccgtggcctttgccgcccaccactattcgcagctcacacagtttacctgtgagaccacactcgactcttgccagtgcaaactgccctcctcggagccgctcagcaggacctttgtttaccgggatgtgacggactgtaccagcgtcactggcactttcaaactgttcttactcatccagatgattcttaatttggtctgcggccttgtgtgcttgttggcctgctttgtgatgtggaaacataggtaccaggtcttctatgtgggtgtcaggatatgctccctcacggcttccgaaggcccccagcaaaagatctaacattcttgctcaaagttgcgagagaaagtagcacatggagtagctgaggttaaacaaacaaaaaaaaattttaaacaaagaaaggaaaaaaattgacaataaaagtcactcttctaattgaatatttttatatttttatgaaacaaaagagcatttcttcaggtttctattgtattttttttaacattcttgcagagaaagcaagatccaaattgattttgggatattaaaagttaacagaacactgaacaaggaaagaatggcatagatctatctttacagtctggagttaattcctgttaactcattttatccattccttacataatcttctttcctgttagtccagtttgatggtgtgaatggtgaatttcaggcccagttgctaaattttgtggcatcttcctctagtccttcccacctccagtcatcagccccactctgtcttggagacaggcaggaggtgggggaagagctgaatctctttattttccctggtagagacatcttcaaggcatgaaatagcttaaagagcagagtagaaacggaagaggctttgcaaaaggctagataactaacaacacctgggttggggcggcggcctcttctcttcagctcccttagcttggctccgtaagtggatcacttgccaaatgctttagatgattgcctctcaataattgaaaggtggtggtagttgtattctaaatgatgtagaaggtttaaaaataattacattatgcttctattctatcatctaaaacaaatcattaaaactaatttctagctaattgttaattataattatgctcagaagtctatttaatgagctctgactgtacttacgctgcactgtcggtgttaagagaaattactctcacaagagcagaggcctgaagattctttcttctgaaagccaagcaccacaaggaaaaaaaaaattattaatagctcaggttaaaaacacccatttaaacaaaaacaagagcatttgtaataggaagtgtttatacaaacagcacatttgtgatatgttgaaaagcatctctcttggcaaccaatctatgtttgaggaagattgggtaatgctgatgtgttccattcatgaaactgtatttgatacataatcctattattaattcgtatgcttagtcaacctaggaaatcaaaataatgttttgaagttcttatttgagcaatatggccttgacttggagggtagttttagttgttttgtttttaagtgactgtggtttaaagcacaaatgccccaaggtggggagacttctctctgtgattattgttgctattaaattctgaactgtatccatattttaaggaaggagctaaaaatggaaattcatgaaacataaatggtatcaagaactttatcagtatgctttgttgaaagcagaaattaagataataattgagttcaattcgcctctccgcattgcctattgatacactttactaatcatgaaattctaacctaaaaggaaaacattttcctgcttgtcttagaagaaagtggaataattccactgattgtgataatggtttcaatttctacacaatataaatatccagtataaaggaaagcgttaagtcggtaagctagaggattgtaaatatcttttatgtcctctagataaaacacccgattaacagatgttaaaccttttaatgttttgatttgctttaaaaatggccttcctacacattagctccagctaaaaagacacattggagagcttagaggataagtctctggagcagaatttatcacacacaaaagttacaccaacagaataccaagcagaatgatgaggacctgtaaaataccttgtgccctattaaaaaaaaaaaaaaaaaaaaagccagtaactgaatccattttgatttttggttgagtttcctacacaaagaagaaaataactgagaatctggaatgttgtagtccatcctttaaagagtaagaaagtagcagttaatgctagtaaccgtgaattaggcaccactgaaagcacatcccgaatttctttaacaacaacattttatagtgaacactacaagtttttatatttaaaaattaagactctgtatatccttaaggtgctctatgctttaccagtaattcacagggtatttcaaatggtagaatcattttagcttctgtgcttcctttttctaaataatgcaacttgtaagagttgacattgtaataagctttataatagtataaccgtcaggagatatatatatatatatatacacatacacacacacacacacatatatactatacatatataaaatggggatattactattgtatgattaaatcattcttaagtccccaaggaaaaaaaatcataaacaaatagaaagaactaaacagaaaagaaagaaagaaaagatccctttgctatgagctcgctgtatattgataagtgtaagaattgtgttgcatgaataaccgctttgggctggatttgaagtattttgatgttgtgttttgcaaatattgaagttacaataatggcaacagaaaaggaacagatacacagctttacacttagcagaatgttacatttaaaatctgacaaggcgccaagatggtgactgtctcctctaaaccacgaaagagtaagatttgtgcaaccctcctcctcttccacctccttcaggagaattaaatgaatcaagactttggaaagacggggaagagccgggacttggcagtacttgaaacaggaggaatacaccagcctaaatgtacagactttgtagccgagcccactcgatcggtctgtgccttcacgtgaccaccatctgtgcctccctcgctccatccaaatttgtgtaggctgctccttggagctatgcctaaaatatagctacaccagagccctggaaactgtagtcaagtaacaggcctcactgttttttttctttggattaaaagtgtatatctctctactgaggggtttccagctttacacttctataggttgttctgacagtgagaacacattatgtacatgttttctattcatgtccagggcatgagaatcttaatattcttatacttccctttttgcatgcagtatgtctggaatatgtttataaaattttagcaaggggtgagatcaagggacaaaggtagagtggttatttaaagacaatcagaaatgaacttaaaagctgccctgcaaaaccaatcctttcctatcatgaagagtaccttcatattttctagagattgtctctgaaccgttgctacatagccataaatttctgtaaatcatgttggctatcagttcttgctattctcagagcactctatcatgtttttaggtgtatattgtgtattcaggatagcattaaaaagaactgatggcaaatgtattgactcacagtggaaacattcatttggatgaagaattagtggtttagcctttgaaatgaataccttgaatcatttcttctgattttctagtagtttattatctcaaatgattattatccccttcaaaaatactggtctgtactttggtgttgtggtttcatttttctggcattgatcaaatagcaaatacaaaataaagcatttctacatgtttgaggtggttgtttttaaaggggatatgtgtaatgcagattttctttattaataaaattttcataatctctgaaaaaaaaaaaaaaaaaa

SEQ ID NO: 223 - DNA, 4032 bp, Homo sapiens
gaagacgtggcttggggccgccatcttggcaagaggcgaagcggcagcggttcctgtcaagggggcagcaggtccagagctgctggtgctcccgttccccagaccctacccctatccccagtggagccggagtgcgggcgcgccccaccaccgccctcaccatggtgctgttggcagcagcggtctgcacaaaagcaggaaaggctattgtttctcgacagtttgtggaaatgacccgaactcggattgagggcttattagcagcttttccaaagctcatgaacactggaaaacaacatacgtttgttgaaacagagagtgtaagatatgtctaccagcctatggagaaactgtatatggtactgatcactaccaaaaacagcaacattttagaagatttggagaccctaaggctcttctcaagagtgatccctgaatattgccgagccttagaagagaatgaaatatctgagcactgttttgatttgatttttgcttttgatgaaattgtcgcactgggataccgggagaatgttaacttggcacagatcagaaccttcacagaaatggattctcatgaggagaaggtgttcagagccgtcagagagactcaagaacgtgaagctaaggctgagatgcgtcgtaaagcaaaggaattacaacaggcccgaagagatgcagagagacagggcaaaaaagcaccaggatttggcggatttggcagctctgcagtatctggaggcagcacagctgccatgatcacagagaccatcattgaaactgataaaccaaaagtggcacctgcaccagccaggccttcaggccccagcaaggctttaaaacttggagccaaaggaaaggaagtagataactttgtggacaaattaaaatctgaaggtgaaaccatcatgtcctctagtatgggcaagcgtacttctgaagcaaccaaaatgcatgctccacccattaatatggaaagtgtacatatgaagattgaagaaaagataacattaacctgtggacgagacggaggattacagaatatggagttgcatggcatgatcatgcttaggatctcagatgacaagtatggccgaattcgtcttcatgtggaaaatgaagataagaaaggggtgcagctacagacccatccaaatgtggataaaaaacttttcactgcagagtctctaattggcctgaagaatccagagaagtcatttccagtcaacagtgacgtaggggtgctaaagtggagactacaaaccacagaggaatcttttattccactgacaattaattgctggccctcggagagtggaaatggctgtgatgtcaacatagaatatgagctacaagaagataatttagaactgaatgatgtggttatcaccatcccactcccgtctggtgtcggcgcgcctgttatcggtgagatcgatggggagtatcgacatgacagtcgacgaaataccctggagtggtgcctgcctgtgattgatgccaaaaataagagtggcagcctggagtttagcattgctgggcagcccaatgacttcttccctgttcaagtttcctttgtctccaagaaaaattactgtaacatacaggttaccaaagtgacccaggtagatggaaacagccccgtcaggttttccacagagaccactttcctagtggataagtatgaaattctgtaataccaagaagagggagctgaaaaggaaaattttcagattaataaagaagacgccaatgatggctgaagagtttttcccagatttacaagccactggagaccccttttttctgatacaatgcacgattctctgcgcgcaaggaccctcgactcacccccatgtttcagtgtcacagagacattctttgataaggaaatggcacaaacataaagggaaaggctgctaattttctttggcagattgtattggccagcaggaaagcaagctctccagagaatgcccccagttaaatacctcctctacctttacctaagttgctcctttatttttattttattattattattattattattattattttttgagatggagtctcactttgtaacccaggctggaatgcaatggcatgatctcagctcactgcaacctccgcctcctgggttcaagcaagtctcctgcctcagcctccgagtagctgggactacaggtgcacgccaccacgcctggctaattttttgtattttagtagagacggggtttcaccgtgttgcccaggctggtcgcgaactcctgagctcaggcaatccgcccacctcagcctcccaaagtgttgggattacaggcatgagccaccatgcccagctgctcctttattttaatccctaaatataatccctaaatatagttatatttcatacttagtttgtttttaaaaagttttctctgtagaaaattttaatcattcataccctttacctttaggtttttctttctatacattcagtcaggcactgggatcatctgtttacaggcattatatttatttggcactcctggaacaagtatatctaacccattcttgatttttggactattcaggtgaactatttgaggggtatggggtctagaagttaaaagatacgcatgtcttctgttcttttcccgtatcaattcattccttcatctctttgccaagttgttttcctttcagggcctgtccttccagtttagaacagtaccatgaatcccacttgtgtcaatattaaagatagctgagaagcacctttcaaatggcacagtccctcttcaagatgtctaaaagaatggttatgtctgtccagttagggatttcacatccacatgtaatcatgtctgctgctgttgctacccaaattttcatttctccacattttgggtacttaagctaaaacgtaatggccacagtctgtaatccattcacattcctcagtttcaccacctccctcttccagactgcactctctgtcatcagtcccctcctttctaacagaaatggggttatgattttgaaggctgtgggttcagggagtctttgccaatcctgttggccctaaactatcaaggaggctccatttcaccatttgattttttgcatttcaggaggcaactgattgtttcgatatgtacatattactcacgtataccccatttccttccagtcagcccaacattttccaccagtctgtccccatctctgaaatccttccttctctttccccctaagtcttttgagtgtcatcatgtactggtggtttctcggttccatctcatccatttccttttcaatggagactacagcgtcagccagctcagccttggcttttaactcaatattccagtccataggggtggttaaaagttgctgcaaggctgcaggcactggcagtgggaagaggcagacgactagatgacttctgcacttttagctggttgaaaagtaccactcccactctgaacatctggccgtccctgcaaagagtgtactgtgcttgaagcagagcactcacacataaatggctgtgtgtggaattgcttgccaaagaagtttctagcctttccctttcccctaactgcatcagggaagaattcttatctctagcttggtttccacatgaggtttttctgagaagggcttgggacaagaagtctgtcatgttagttaagcaggcaagaaatcctactaatccagttttgtttgaaagttgtttgtccgtatgattttttaaaagtcaagtttaatttcaaaaaaccttttttttctgagattacttttggggtaatatttaaaatgagagacattttgtaaccctgtaaaatacatagggaatataacattccagtgtatacaaagaaggcaaattctttaatcaaataaagcgcattataaaatgagatgtttattggattattgactcactttggtgtctgcttgttgattcaggatgctgtaatgggacctaacattaaaaattaatgacatgttttttttaagagaaaaaaaaaaaaaaaaaaa

SEQ ID NO: 224 - DNA, 8351 bp, Homo sapiens
ctgccgtcgtggaagcaggatttccgcggttgtgtaacggcctgtcgcaggcgtgcagggacctggactccgcctcgtccccggggctcgggcagccgagccatggcggggaactgtggggcccgcggcgcgctgtcggcgcacacgctgctgttcgacctgccgcccgcgctgctcggagagctctgcgctgttctggacagctgcgacggcgcgctgggctggcgcggcctggcagagagactttcaagcagctggctggatgttcgtcatattgaaaagtatgtagaccaaggtaaaagtggaacaagagaattactttggtcctgggcacagaaaaacaagaccatcggtgaccttttacaggtcctccaggagatgggacatcgtcgagctattcatttaattacaaactatggagcagtgttgagtccttcagagaagagttatcaggaaggtggatttccaaatatattattcaaggaaacagccaatgtcaccgtggataatgttcttattcctgaacataatgaaaaaggaatactgcttaaatcttccatcagctttcaaaatatcatagaaggaactagaaatttccacaaagacttcctaattggagaaggagagatttttgaggtatacagagtggagattcaaaacctaacatatgctgtcaaattatttaaacaggagaaaaaaatgcagtgtaagaagcattggaagaggtttttatctgagcttgaagttttactactgtttcatcacccaaacatactagagttggctgcatattttacagagactgagaagttctgtctgatttatccatacatgagaaatggaacactttttgacagattgcagtgtgtaggtgacacggccccactcccttggcacattcgaatcggtatattaataggaatatccaaagccattcactacctgcacaacgttcaaccatgctcggtcatctgtggcagtatatcaagtgcaaacatccttttggatgatcagtttcaacccaaactaactgattttgccatggcacacttccggtcccacctagaacatcagagttgtaccataaatatgaccagcagcagcagtaaacatctgtggtacatgccagaagagtacatcagacaggggaaactttccattaaaacagatgtctacagctttggaattgtaataatggaagttctaacaggatgtagagtagtgttagatgatccaaaacatatccagctgcgggatctccttagagaattgatggagaagagaggcctggattcatgtctctcatttctagataagaaagtgcctccctgccctcggaatttctctgccaagctcttctgtttggcaggccggtgtgctgcaacgcgggcaaagttaagaccatcaatggatgaagttttaaatactcttgaaagtactcaagccagcttgtattttgctgaagatcctcccacatcactaaagtccttcaggtgtccttctcctctattcctggagaatgtaccaagtattccagtggaagatgatgaaagccagaataacaatttactaccttctgatgaaggcctgaggatagacagaatgactcagaaaactccttttgaatgcagccagtctgaggttatgtttctgagcttggacaaaaagccagagagcaagagaaatgaggaagcttgcaacatgcccagttcttcttgtgaagaaagttggttcccaaagtatatagttccatcccaggacttaaggccctataaggtaaatatagatccttcttcagaagctccagggcattcttgcaggagcaggccagtggagagcagctgttcctccaaattttcctgggatgaatatgaacagtacaaaaaagaataaattctaccagaagataaagaaaaaagcaagtattgcataggcacctgagcataggtatgaccttgggaagacattggctccataagcaatgccaagagaatgatcaatagtgagtttgggtgatgcagataaacaatctggataattccatttcttttttcccaaaccctcaaacagagtgccttaaaaaattgttttatcaggataattgtctcatgaccaaatccacgctcaattagagccattcaaaattccttaagatcatgggttctgacttcagccaaacaaaacaatcaaaacctaccaaaaagggactggattgtaatgtcctctccatcatcctcagtgtgagtcctcagagcctccatctgccaagaacattcagttggattccatcgtttggtttagcttgcttgcacgggttgtaggaaatgtctaatttgtaaatgttaatagatacctttggaaagaatcaccttgttattctgattgacccctcttgttttttggttaatccctgactagcctgcttgtctgaaaatgagccaggttcacccttagctacggcatgctctgggttgaaaggggatttcttcccaagatctatcctaaactcttaggacagtttatcctgtattgactattattacagctttttaaaaacagacttagtgacctattatatcttaaggagactatgtgaaatgtccatcaagtaatttttattcctgagaaaatggctggtcaagggcctaggtcagctttttgtttaatctacacctttcaactctgggccttcattcctgctgtttcttggatctccctcttttgaaatcctaccaatcatcagagctctacaaaacagccacctcctggaagcttccctaatctctacaaccagaagtactccctttatcagtatttccacagcaatttctttgtatttctattttatatttatcactttctgaattatatcaaagctgcttgtcttatctctttttttttttgagacggagtctcgctctgtcatccaggctggagtgcagtggcacaatctcggctcaccgcaaggtctgcctcccgggttcacgccattctcctgcctcagcctcccgagtaaaggtgggactacaggcgcccgccactacgcccggctaattttttgtatttttagtagagacggggtttcaccatgttaggcaggatggtctcgatctcctgacctcatgatccgcctgcctggcctcccaaagtgctgggattacaggcgtgagccaccgcgcccagccttcatctcttttactaggttgtaaactccctatattagttttctattgtttttgtaacacattatcacaaatttagtgacttaaagtaacataaattaattattttgcagttctggaggtcagaattccttagcattctttctggaggctgttggggagaactcactgccttgccttttccagcttctagaggccacctgccttctttggctcatggcctcttcctccgtcttcaaagccagcaacgtgacatttcagatctccctctctctgtctgtctcaccgcatctcttcactaccctcttcctctcattctggcccttctgcatgtcttttataaagacctttgtgatttcactgggcccactcatataagccaggaaaatctctgtgtctcagatccttaatttaattacacctgcaaagtccgttttctcgtgtaaagtaacatattcacaggtttctggaattgggacgtggacatcttcgggggaccattactctgtctgtcatactccctgagtgtgtaagggccatctcttcagagcctaatgtgtcatcctacacagagcaggtgtttccttataaattaagttgaattaaattacccctatgaagccacataatcaataattcagctataataaacattgccgaataaattaacaaagggaggataatgactccttatgatgatggatagaaacactgaagaaaaccattttcagaggatttactgaattttcctctccaaggagcttgtaatagaagggtaaacctctagtttcttgtccagcagaggaataggctcatgtcttttgttttattttatttttttggtgagtcagtatggttgggttaatcatattcacattagattccatgttgaagaacaactaatcaaagaagaaaatcatcaggaatcagggtgagattaacagaccaaggtcagaaacatggagttacaattttccaaaaaagcacgaagtgagattaaaaccacagtaagtcttagtctgactgacaggctttatacaggccctcggtaagcagttgggagaacccatgcccaccactgctctgtacggtatctggctgctcagagctctctgattcacaaaagagatcatcaagaattgactctgtgttaaactgtttttcacttagaatatggacccccaccaatacattcaatgaagggtcattaaggaagctctgattaacaccaggcccatgcagttactccgcacatataatctgtgggtattatgttgatttgaacttgcttagctgacttaaagcagggtttctcaaactgtagtatgcatcagaatgacttggaaagctggttaaaaacgcagattgctgggtccacccagcttctgatgcaataggtctggggttagaaattttgctttctaatgagttcccaggtgatgctgatgccaatgatgtgaagcccgctcttcacatccgtgaaaatcgctgccttaaggtgctcttaaattgttatagattggtagatcctacctttccatcactggtatgttttttgagaaaaggatcctttcttttcattctgttatattcatcctattacataggatgttggttagcacagagtgggagctctagaaagattgttgaccaatcatcttattgactagaccatctttctagagtataactattttggacacctcaaagatgaagtcagataagctggcagtgacctgattaacgttgtggtaagcagatgccactgtggctgggaagtaccaaatcttctgttgagtgattcagtcttcctgactagatttgccttctagtgggtgtattaataagcgttagttgatatgaattaaatgttgcaactttctatgggtaataagaggatacctttatagtttcatgatgtggagaccaagatacataagaaagcaagaatgagtctccgggtgttccctctgatcagcaaacatgaattcataatttcatttactctcatttttgtaatgcactctgagcaatcctccaggcagatcctatttactaagcttcaggcttttgtcccattttataatgcccaaacacatggagaaaacattttgttgtttttaaaaacaggtatgggatttctgatataatcaattttattgacttcttgggagttgtaatgatctgtgactcactgcataatattgtagttttatagggtggcacatcaccctgtgtaaaacaactttaatgacctgaggactgatgagtacaggaagtgaggtttatcatgagtagcatttattaagcatctgctagaatcaaagcactgcattagctactaaggtacaaagtaagacacagtttaataaggaagacagggcatctacccaagtcaacagttcagtgacatctgttatttgaaccacacaccaatgcaaccgaagtaaatgctgaaagggtgagaagaaggaatagattactatgcatttttgagaggatgaagaaggcttcttggagaaggtttctgaaaagagatacggaattaagagaaatagaaaagagcactgacgaagcactcaggatggctattcaaggaattggggatccacagcagctgtgcacaaccatccctaatgccagaaaaatggggtaagggtgaagggaactgggtctagagctttgcatgtttttttctggttaacccttagagtcaccctgaaggtgtggatcccatcttataataaggtgaggacactgagtcaggaaactaacttgctaaaatcaagtcctcccagtcctcccatcaggtccttccagatctggaggagccaggatttgaactcacatttgtctgacttcaaaatccatgctttttcttgtgttccaaattgcacaatggagtcactgccagttcaagctcctatgaaaagggatggatgtgaaaagtcatttgttgattccacagatttttagtaggtaccatgtctcctgcctttatcactatcctactcctctgctacaacttctctgctacaggcacccactgcagttacttgatatgagttaaatgaatccatccatccaaacttccattcattgaataaatacttagcaatggcttcctttgtatcaggcactattctaggagctggggctacagtgcagatggaaaccagcaaagctcactgccctcatggagcttatatgtaagtgaataaatctcagggtggttctcctgtcataggtcctggctcctctgccagctcttccaaatgggttcagagaggttttctccttgtcctgttgtgtaactgataatcccatggtggacctcactttgctattcatatgcactaagtagtttatggtgtgctttgtggctggcaattgtgacagattctattcttctattggtatgtggtttctttggggcatttgtttggatactgatggcatcttccgggggtctgaggcacctacacaaacctcaggtcactatcacgtgatactggagttgcctgttaaattatatttcttcttccacaaaactgcaggttccctgagggaaaggtctatgtcctgctcatttttggatccctaatggctggcacagtacctggtgcataatatggttcaacaaatatttgtaaaatgaatgaatcaaatagtccttcaaagcatcttcagaatcaagattgtcatctagattgcacccgaagtttatctttctagtattcagaatataatcaatcattgcttaaattattccatttcatcattcttgaataaaagctactaattttaaatactaatatctgagatatcttcgaaaagaagattagtcgttgtatgtgttgcttataaattttctctatggtggaaaatattcccaaaccatgtctaagcaatgaaaaaccagtgttctggcaggaaataaactgatgtttgttgtgttttgtatctgtcttcccgttccaaatcatttatatatacttgatggtctgtgggcttgacttgcaagtattttcctgggagacatttttattcaaaagacctgtattgcctgccaaaccttcatttaagagactcattatggatgtcatctgcatcattgcaaacttttctggtcgtctctataaatagcaagataatatttacagagttttacattggctcttgaattttaaaatattcttatagacaaacattaattggaatggggggtaaggaggtaggaatggcttacttgcggaaatgcaggctcattgttgtgtctagtaggtgctaggtgcattcacacatctcttaagctttaaacaacctattgagccggtttccatttccttgatctattagatttaaaaaaatgaagcataaaggagttggctcttgccctaagtcatactactgatggaatgagaatacaaaccaaaaacactttattcaagtccaggaaatatctgccttgaaaaagaataacttaaaaattaaaagtgtcctctatttgaacatgaaaacagctaataaagatgtgttattttattttattattattaattttgtcctcccatattggcaaagataaagcaattgacaaaaatggaattcttgttcaatactggcaggagtgaaaattggtagaacctttctagaaggcaatttggcaacatgtatgaaaacctaaatgttgatacacctttacccagcagtttgtttaggaatttatcctaatgaataaaagttgtccaagtcttcaaacatgagcccaaaggtatatttcatgatgtttatgatattaaaacattggaaacaactgaaacatccttcagtaaaagatggattaaataaattccatgcagttgtcatttaaaaatatttagatatatgtttattgctatggatatatgttcccaaaatattattgaatcaaaaagtagactacaggatatatgttgaatatgagctcatttataacattgaatattttaagataatgtatgtttcatagagagatcttcaccaaatgttaaggatttttttttctgggctgtggtatttgggtgatctttacattcttcagactcatgtgtgtttgaaactttttataatgaacatatatcatttttattagaaaagaataaagtttttgaaaaaaaaaaaaaaaaa

SEQ ID NO: 225 - DNA, 3270 bp, Homo sapiens
acttttcttttcctctttgactgagcaccgaggggcagttggcagcttcacctcagagctgcaggaaggaacggggcagtgaaaatcgaatcgggtgtgatcctaggccaagctcatggcccagcagggccagcaggggcagatggcaagtggagacagcaatctcaacttcaggatggtcgcagagatccagaacgtagagggtcagaacctgcaggagcaggtttgccctgagcccattttcaggttcttcagagaaaacaaggtggagattgcaagtgcaataacaaggccatttcctttccttatgggcctccgagaccgctccttcatctccgagcagatgtatgaacattttcaagaagcttttagaaacctggtcccagtgacaagagtgatgtattgtgtactcagtgaactggagaagacatttggctggtcacatctggaagcattgttcagcaggattaacctgatggcctatcctgatttaaacgagatttacagaagcttccagaatgtatgctatgaacactcacctctccaaatgaataatgtaaacgatttagaagatagacccagattactaccatatggtaaacaagagaacagcaatgcctgtcatgaaatggatgatatagcagtgcctcaggaagccttgagctcctcgccaaggtgtgagccaggtttctcttcagagtcttgtgagcagttagctctcccaaaggctggtggaggagatgctgaagatgcacccagcctactaccaggtgggggagtgtcctgtaaacttgctatacaaatagatgaaggagaatcagaagaaatgcccaagttactgccttatgatacagaagttctagaaagcaacgggatgatagatgcggcaaggacatacagcacagcaccaggggagaaacagggagaggaggaaggcaggaacagtcccagaaaaagaaaccaagacaaggagaagtaccaagagagtccagagggaagagacaaagagacctttgatctaaaaactccccaagtcactaatgaaggagaaccagagaaggggctctgtctactaccaggtgaaggagaagagggcagtgatgactgttcagaaatgtgtgatggagaagagccccaggaagcctctagctccctagcaagatgtgggtcagtttcttgtttatctgcagagacctttgatctaaagactccccaagtcactaatgaaggagaaccagagaaggagctcagtctactaccaggtgaaggagaagagggcagtgatgactgttcggaaatgtgtgatggagaagagcgccaggaagcctctagctccctagcaagacgtgggtcagtgtctagtgaactagaaaatcacccaatgaatgaagaaggagaatcagaagagcttgcttctagcctgctatatgataatgtaccaggagcggagcaatcagcatatgaaaatgagaagtgttcctgtgtcatgtgtttctcagaagaggtgccaggaagcccagaagcaaggacggaaagtgatcaagcgtgtggcacaatggatactgtggatattgcaaacaactccactttgggaaaacccaagaggaaaagaagaaaaaagagggggcatggctggagcagaatgagaatgagaaggcaggaaaacagccaacaaaatgataatagcaaagccgacggccaggtggtctccagtgaaaagaaggcgaacgtgaatctgaaagacctttccaagattagggggagaaagagaggcaaacctggaacccgcttcactcagagtgacagagctgcacagaaaagagtccgatcaagagcttcaagaaagcacaaagatgaaactgtggattttaaggctcctttgcttccagtgacctgtggtggggtgaagggaattttacataagaagaaattgcagcaaggaatcttggtgaagtgtatacagactgaggatggaaaatggttcacccccacggaatttgaaatcaaaggaggccatgcaagatcaaagaactggaggctgagtgtgcgctgtggcgggtggcccctacgatggctgatggagaatggatttctgcctgatcctccaagaatacgttacaggaaaaaaaagagaatactgaagtctcaaaacaatagctcagttgacccttgtatgagaaacctggatgagtgtgaggtgtgccgggacggaggggagctgttctgttgcgacacttgttcaagagtcttccatgaggactgtcacatcccgcctgtggaagctgagaggaccccgtggaattgcatcttctgcaggatgaaggagtctccgggaagccaacagtgttgtcaggaatctgaggtcctggagaggcagatgtgtcctgaggaacagttgaaatgtgagttcctcctcttgaaagtctattgctgttctgagagctccttttttgccaagattccatactattattatattagagaggcgtgtcaaggcctgaaggagcccatgtggttggataaaatcaagaaaaggctgaatgagcacggttacccccaagtggaggggtttgtacaagacatgcgcctcatcttccagaaccacagggcctcttacaagtacaaggattttggccaaatgggatttagactggaggctgagtttgagaagaatttcaaggaagtgtttgctattcaggaaacaaatgggaacaattgactggattagtggatgctgaaagcattcagcaaatggcaccctaaaatatgccgctggtttgccactgacttcaaaatgaggtcacttgggcacagcacatgcagggaggggcttttctctgagcctccttcatctgcccaaagacaaatcctcaaaaggaaattcaatcatcatgaatcacaaccccaagtatctcatcagccagggaagagtaagtgggatcacagggaaggatgttggcagcgacaccatcccatacaggctcttacctcttctcctgagggctgctccagacaacatttattacccagaagaccttttgtctgaaaaccagccaagctttattcaggacacacttcttgccttcactttcccacttccgtggccacctccatgcagaagccctaagcccacattctttcgatagctcacggtggtgcatgagtgtccatcatctgactcttctcggagtctcatattttgtgggactcctgtgcaaacatatgttattaaaatttttttcctcctgttaaaaaaaaaaaaaaaaaaaa

SEQ ID NO: 226 - DNA, 3344 bp, Homo sapiens
tgcgcggcggcggcgcgcgggcgcctggggcgggacttccggcgcgctggagcgttttccggccgtgcgtttgtggccgtccggcctccctgacatgcagccctctggaccccgaggttggaccctactgtgacacacctaccatgcggacactcttcaacctcctctggcttgccctggcctgcagccctgttcacactaccctgtcaaagtcagatgccaaaaaagccgcctcaaagacgctgctggagaagagtcagttttcagataagccggtgcaagaccggggtttggtggtgacggacctcaaagctgagagtgtggttcttgagcatcgcagctactgctcggcaaaggcccgggacagacactttgctggggatgtactgggctatgtcactccatggaacagccatggctacgatgtcaccaaggtctttgggagcaagttcacacagatctcacccgtctggctgcagctgaagagacgtggccgtgagatgtttgaggtcacgggcctccacgacgtggaccaagggtggatgcgagctgtcaggaagcatgccaagggcctgcacatagtgcctcggctcctgtttgaggactggacttacgatgatttccggaacgtcttagacagtgaggatgagatagaggagctgagcaagaccgtggtccaggtggcaaagaaccagcatttcgatggcttcgtggtggaggtctggaaccagctgctaagccagaagcgcgtgggcctcatccacatgctcacccacttggccgaggctctgcaccaggcccggctgctggccctcctggtcatcccgcctgccatcacccccgggaccgaccagctgggcatgttcacgcacaaggagtttgagcagctggcccccgtgctggatggtttcagcctcatgacctacgactactctacagcgcatcagcctggccctaatgcacccctgtcctgggttcgagcctgcgtccaggtcctggacccgaagtccaagtggcgaagcaaaatcctcctggggctcaacttctatggtatggactacgcgacctccaaggatgcccgtgagcctgttgtcggggccaggtacatccagacactgaaggaccacaggccccggatggtgtgggacagccaggcctcagagcacttcttcgagtacaagaagagccgcagtgggaggcacgtcgtcttctacccaaccctgaagtccctgcaggtgcggctggagctggcccgggagctgggcgttggggtctctatctgggagctgggccagggcctggactacttctacgacctgctctaggtgggcattgcggcctccgcggtggacgtgttcttttctaagccatggagtgagtgagcaggtgtgaaatacaggcctccactccgtttgctgtgacgggtctgctgcagtcctcagtcgggggtcctgggcaccatgtgactccccatcctcccatgaggggtccctgccctggatgagtcctagctgggggacaccctgagagctcgagcccctcccacccgggcatccgctggctgcctcctgtcagctgggcaggcggggcccacagtacctgccccaccaggacagcctggctcaggcctttctgggctgcttctcacatcctgggctggatgtgggtttggaagctctggaaccatcccggactcgcccactcctggattcgagggccctcgcagggacagctctgcccagcatcaccccagggcctggcagtgatagagctgagagctccacccccacatacctgccacccacctggccagccacagcacgtgtgtcacctgcagagagccacccagacgtccccaccgagtccagcacggcaagggtgcaggggctgccctagaaatgggctcagaggagcctggcccaccctcttgaaactggtcctggaccttggctcagctctgccgcctcaggtagcacgacccccaggccagcctggacacatcagggagcatggtgaggggcaacggcaggacccgtgggccatatcgggacaggcatttccagcgaggggtggggcagaggacatgtggctggcaggctacacccaccctgccatgcagcggtgtccaggctctggggaggccctggggaatttggaggcatcatgagccaaggcctggtggccctcgttcccctgcccctcgtcaccatcctgtccttggctggccgtgaggactcccctcctcaccactgggtcccacagggctgaggtgggcagtagagggcataggtgggtacatgtcccgggcaaggtctctcggggggacagaagtgagtccagggagtgggtgggcctgggcgtccctcactcagaatgccgtggggtgaggacggtgaggacagggtgggcactgggttctggtttagagtcagtaatgttagggcgcagtgggcagggggtcaggacatctccagccggtggtgaggaagcatggtggggtctcctccacaggacgggagctggggagggggtcctgggtcggacccaaggcacccacacttgagaaagcctccgcctggacgtcagggaggcctgcgagctgccacagtgcaggtgcagccgttcccaccgccctgctgctgcttgacacgggcataggagatacaagtggtgtgtgcggcggttcatgcctgtaatcccagtactttggaaagccgtggcgggaggaacgctgggcaacatggtgaaaccccgtctctaccccctaaaaatagaaaaattagcaagacatggtggcatgtgcctgtactcctggctactcaggaggctgagatgggaggatcgcttgatgaggttgaggctgcagtgagctgtgaccgactgcactccaaaaaccttgtctaaaaaaacacaagctgccactggctttggggcactgaccttgtctccccagaggtgctgacgctaacattcaagttgttctcgggggtcctgtggcttctgttggagtgagggtgggggacacgcaggtctgggagggtggtgtgggcctggagctaggcattgccagatcagcattgggtggaggcaggggtggggatgccacacaggatgggatgtctagagcgggctgtgtctcccggggggatgggcagagggtggggcaggaattagctggaaatgagattgtggggtgcagtttggggatcagatgccccaacctgaactgaccgtcatccctgtggccagggtccccacacaaccctcacccctggctgtgagaatcctgaggcaccttgatgcattttttttcatgccctgtgaaaaaaaaaaaaaaaaaaaaa

SEQ ID NO: 227 - DNA, 2711 bp, Homo sapiens
tgccagtccccaccagcccttccccagagggtcaggtgacccttccctccccaggccacggcagcccggccctcccgggcagacctcccgcaccagggctctggtgaacagcaaatgctccacgctgggacgggccattgcctgatgcctgtacatggtgggcactgagagacaagattcctgggccctgccttccatacactccccacgatctcggaggaagctctgaggaccccgctgagaacccacagacaggaggacaactgcgctatgacagcaataaaggccaagaaggagaaagttgaggaccgctgacagccccgtgtgctgttgggagctgccctttctacttcaaaccttcctctagcagactgtgcagggaccccccaccaccaccatctgccgccatggttgtgcaaaacagcgcagacgccggggacatgagggcaggcgtgcagctggagcccttcctgcaccaggtcggggggcacatgagcgtgatgaagtatgacgagcatacggtgtgcaagcccctcgtctcccgggagcagaggttctatgaatccctgccgctggccatgaagcggttcaccccacagtacaaaggtaccgtcacagtgcacctctggaaagacagcacaggccatctcagcttggttgccaacccagtgaaggagagccaggagcccttcaaggtctccacagagtcggcggcggtggccatatggcagacgctccagcagaccaccggcagcaatggcagcgactgcacccttgcccagtggccgcatgcccagctggcacgctcacccaaggagagcccggccaaggctcttctgaggtccgagccccacctcaacactccagccttctcgctggtggaagacaccaacggaaaccaggttgagaggaagagcttcaacccgtggggcctgcaatgccaccaggcccacctgacccgcctgtgctccgagtacccagagaacaagcggcatcggttcttgttgctggaaaatgtagtgtcacagtacacgcatccctgtgtcctggatctgaagatggggacccggcagcacggcgatgatgcatcggaggagaagaaggcccgccacatgaggaagtgtgcgcagagcacctcagcctgcctgggtgtgcgcatctgcggcatgcaggtttatcaaacagataagaagtactttctctgcaaagacaagtactatggaagaaaactctcagtggaggggttcagacaagccctctatcagttcctacataatggaagccacctccggagggagctcctggagcccatcctgcaccagctccgggccctcctctctgtcattaggagccagagttcataccgcttctattccagctctctccttgtcatctatgatgggcaggaaccaccagaaagagccccaggcagcccgcatcctcacgaggctccccaggcagcccacggtagctctcccggtggtctcaccaaggttgacatccgcatgattgactttgctcataccacatacaagggctactggaatgagcacaccacctacgatggaccagaccctggctatatttttggcctggaaaacctcatcaggatcctgcaggatatccaagagggagaatgaaacttcctgggcttatctggattcttctgggctatagatctcaaatagagacctgttggttgctagggtagtccagacaccccttagatgtcttcataatagtcctatctaccttcaaaaaccatctctatatatggcagactatattaacagctgctgaacaaatcagctctggaggtgattccacatcccctggcattatgctctaatgctgctcatcggagaacagacagccaggataaagtggcaccttctggagtacactggagggggcagcccaagttagaggccagcattgctgacattctggaatatttgcatctaaaaatgtttactcgttgccatgctgcagtccgcacaagctgtgaggcagaaaacttgacttgaagcagccttgaagagtgagttcatgagctcatggtttttctccttgtatggactgctcgctccaagggcaggcagagctcatgaatgcctcttatcttcctaagcggagttttaggtgacacaggatgaagcagaagagatctacccatctcatctgctctgcacccagcttctaagtggacaaagccaagcccaggcatgagctctggcaaagcaagaccccagattctccatttttgcctgtggaaaggagggtccctttacaggcttttttttcctttttttcccccaaaatctcttaaaatgaggaatctcttagcagactttggagttccccattctgccacattctgaccatgagacgcggcttgcagtgggggtgaacgcacataaaaagggaccactgacgtcctgctctactctctgctttctatttatttattttgggggtgggttggggagtcagaagaacctggaggacggaggaaaccaggggcaatgtttacaagactggtggacaagtgtaaatatggaataagaacaaacagttctaattaattccttcttctgcagtatggaaacctattacgatgcccttgagtcaagcactgagatacgttacccaattagggaaataaatttgttaataaaattgctgaggtcaccaaaaaaaaaaaaaaaaaa

SEQ ID NO: 228 - DNA, 2178 bp, Homo sapiens
gcgagggaacggcgggcgggcgcggagcatgcggagcggcgccccgggcggcccccgggcttgggcgagggcttgggccaggcgcgcgggccgttggggttcggagcttcgtgggacccgcggccggcgcggggacgtacggcagtgactcggggctcaccgggggccagtgccgggccagggggccagccccgcccgcgtctcggcccggacggcccggcgaggaagctcccatgcgggaccgcgcggcccggtgagggcgcgcgcgggcgggcggggacgcagccggcaccatgtccatgctgcccaccttcggcttcacgcaggagcaagtggcgtgcgtgtgcgaggtgctgcagcagggcggcaacatcgagcggctgggccgcttcctgtggtcgctgcccgcctgcgagcaccttcacaagaatgaaagcgtgctcaaggccaaggccgtggtggccttccaccgcggcaacttccgcgagctctacaagatcctggagagccaccagttctcgccgcacaaccacgccaagctgcagcagctgtggctcaaggcacactacatcgaggcggagaagctgcgcggccgacccctgggcgccgtgggcaaataccgcgtgcgccgcaaattcccgctgccgcgctccatctgggacggcgaggagaccagctactgcttcaaggaaaagagtcgcagcgtgctgcgcgagtggtacgcgcacaacccctacccttcaccccgcgagaagcgtgagctggcggaggccacgggcctcaccaccacacaggtcagcaactggttcaagaaccggcggcagcgcgaccgggcggccgaggccaaggaaagggagaacaacgagaactccaattctaacagccacaacccgctgaatggcagcggcaagtcggtgttaggcagctcggaggatgagaagactccatcggggacgccagaccactcatcatccagccccgcactgctcctcagcccgccgccccctgggctgccgtccctgcacagcctgggccaccctccgggccccagcgcagtgccagtgccggtgccaggcggaggtggagcggacccactgcaacaccaccatggcctgcaggactccatcctcaaccccatgtcagccaacctcgtggacctgggctcctagaacccatttgccttgatgagcttgccttttgtgacttgacactggggacgtggagtggcggtgtccaggggcgccccgcccctgcggccccaccaggtactgaaagacccgcaggctgagcgggtagaacagccgggtagggcagatagctgtctatgttggttcttgtttgggatttattttcaacaagttacttttaggatccttttggggctggagactgagtcttgaaccacagaagggaataaattatacaccactgtcattctctctctccctctgtctcttccttttaccctctcttgtcttgccttttccccctttcctcttcctttcccttccttctcttttcttttttctgctttctgtctttctccctctccttgtattgctttccttctagatttctagcttgccaccgttcattctctccttctgtctctccctttctctctccttctctgtttctcctctcttctctcctgccagtctcttgtactctgtgtcctggtccctccgtatgtacccctgtctttctcctcctgactggtggtctatctgcccctacctctggccctcgctttaccggagtagggggtgggagagggaagaggagagaaaatacagggactttgaacctaggccatctcctgaggccttttccctcgcccatgtgggtcagtgggagctgcaggtgtcagcttttcgtctagtaacttaagtgagagagaaagggcagcgccacagaagcccctaaacgccgcctcgtcatacgcccctcctccttctctcttggcgaggccccgccacaccgcgctcttcctcccgggactgtgactacagcgctcccggctgagcgcgccccccgagccgccgacttgccgtctccccgtaatgccctcatgtgaatgttcttcgggaaatatttctgcttttattttataataaaattagaaatcataaatatataaatggttatatgccaaaaaaaaaaaaaaaaaaaaaaaaa

SEQ ID NO: 229 - DNA, 5437 bp, Homo sapiens
agtgggggcctgatagcgcggcggtgtggaccgcgcggccgaagagcgcggcgcccagagcgcgggccgctcgcggagccacagcccgagccgggtcccagccggagccgagccccagccgagccgagccgggcccggagcgcccggtgcccgcagccatgccggccggccgcgccgcgcgcacctgtgcgctgctcgccctctgcctcctgggcgccggggcccaggatttcgggccgacgcgcttcatctgcacctcggtgcccgtggacgccgacatgtgcgccgcgtccgtggccgccggcggcgccgaggagctccggagcagcgtgctgcagctccgcgagacggtgctgcagcagaaggagaccatcctgagccagaaggagaccatccgcgagctgaccgccaagctgggccgctgcgagagccagagcacgctggaccccggagccggcgaggcccgggcgggcggcggccgcaagcagcccggctcgggcaagaacaccatgggcgacctgtcccggacaccggccgccgagacgctcagccaactcgggcaaactttgcaatcgctcaaaacccgcctggagaacctcgagcagtacagccgcctcaattcctccagccagaccaacagcctcaaggatctgctgcagagcaagatcgatgagctggagaggcaggtgctgtcccgggtgaacaccctggaggagggcaaggggggccccaggaacgacaccgaggagagggtcaagatcgagaccgccctgacctccctgcaccagcggatcagcgagctcgagaaaggtcagaaagacaaccgccctggagacaagttccagctcacattcccactgcggaccaactatatgtatgccaaggtgaagaagagcctgccagagatgtacgccttcactgtctgcatgtggctcaagtccagcgccacgccaggtgtgggcacgcccttctcctacgctgtgcccggccaggccaacgagctggtcctcattgagtggggcaacaaccccatggagatcctcatcaatgacaaggtggccaagttgccttttgtcatcaatgatggcaagtggcaccacatctgtgtcacctggaccacccgggacggggtctgggaggcctaccaggatggcacgcagggtggcagtggcgagaacttggcgccctatcaccccatcaagccccagggcgtgctggtgctgggccaggagcaggacactctgggtggtgggtttgatgccacccaggcatttgtgggtgagctggcccacttcaacatctgggaccgcaagctgacccccggggaggtgtacaacctggccacctgcagcaccaaggctctgtccggcaatgtcatcgcctgggctgaatcccacatcgagatctacggaggggccaccaagtggaccttcgaggcctgtcgccagatcaactgagcacggcaggccaggctgagcccgcccgccctcgccccctgcttgtgcggcgatgatctgttttgtgcgtctcttctctcccttttccccaggaatgaaccgaggccgtcgcccctgcacacgcacacgcacacagcctggttttgtcctcatgcacacgaagcagcccctgctcccatctgtccctgaggaagccccacttctctgtaggagcccggactctctcaggcatgccccattcacagctgaagtgggtgctgcaacgtcttgaacaaggcagaagttggtgagaggatctgtgtgtgcgtgtctacatgtgtgtgtctacgtgtgtgcgtgcgtggctgggggaggccttttctttgaggacgtacctcatttccttctttcttctggctttggaaaaatctcatgatgaaaattcatatttgccaactttgttagctgcgtgcgtgctttggggttggtgcaacctcagtacacgcatttgtctttgtttgcaaacctttctcagagcgacatatctttatattgatgtaataaatgtcttttagtggtttgtcaaaggccgggggcgggggctctctacagagaatttttattttgtaatagaagtgaactgtctctgaagggtgaaggcaggccgtcctgggatggtaccctgtgctctcccgtggaggagaggggatggctgaggacactggcccttaccccagggccagacagcatccatccctgctgtttgcatctgagagcagcatggggcctgggaggtcggcctgtgtgcccagctcagctagctctgccccaggacggccctgccctcgaccttcccacctcctcagatcctgcaaggctggggtctgcccctcccttctcacctctggagctgtgctgcactgcttcagcccagagggccctgagagaggagcgtgccacccacagcccgggaagccgggccccagcacccctctcctttggcctccggcagtgcagaccagaggggaccttttaaggaaagaagccgtgtttcgatgaagacctggccacatggggccactgggacttcaacccagcccatcggtgggaaggtcctttttgggggactttgacagccatatccctcccagcacaccaggcgccaggtgagctggttcagacccctccaggggtactccagagacctcacgtgtggagccaggcctggccagggcaggggcctgaaacccactcctccatctcatggggctcacggcctacagcagcccacaagctgccactggccggcgacactgacacctgagcagtgtccagaacctttttgcctttttttgttccccgtgaaaagcaacatggacatttccttctagtccttccaaggaggggagagaagtgtatgtgcatttgtgtgtgtgtgtgtgtgttgtgtgtgtgtgtgcgctaagtgagaaagagagcaggctcgggaggccctgcccagggtaggaggagcttcctgctttgcaccatctggtggtcgcacgccctgagggcaccccgactctgtctccaggagtctcatcagcaaaccgctgacaagtctttctagaaattctactgcactgcctggctcagctgcagctgcagacatttctgcaggaggagcaggtgtttctgtcttctgttccttctagggccacctgtccccttaaacacaggtccacgttgtgtcaagaacctagtgcatctgtgtgtgtctgtcagtgtctctgtgtcagtgttctcgtgggtgtctgcacggtacccggccgccgttctgcaatgcatcactcccgcagaggggggtgcagatcaggcgccgtgctgcgcgttgttgttcaacagtggctttttcttagataatcgtgcttcctcagcgcccgtcgggttgtggcatccttggatctgcagggatcttctccgtttgcatgttcctcggggtggcgtgttccttgctccctgggtccgacatgtgttcccgcacctgcatggactgccccggttctgtgttgtgtgccgagtgccgcccagtgttctgtgaccacccgtgtagctactgaaaatggctgggtaagcaagtcaagggtgttggaggaggtcaagagagagctcagtttccctctccccctccccaaacacaccaagaagcatttttaacgtgtaggttgagaacaagcctaaaggattcccacagctgggagccagcaagagagcttggagtcgcctctctagaccagatctagccccaccctcactccagccatctcggagcccttgtgtaggcaacgcccggtgcgggctgtgtggggtgctcccctgccagcacctccggccagccccgcccctgccgatctactggaccgcagaccaccttctgcccccgtgggccaggtgggagctgtccgttcaggaccatgagccatcctctgccctgactagcgaggggcagagcacaccccagtgcttacgcctccacccctgcagcctcctggcccgctcaccttcctcacccctcctctgacccacccatggtgccagggccgaagctgacctttagctccctcctgccccttgctagggtctgagccaagcccctcgactccctcactgtgttgacacttggcactttgctggccccgagaaaggtcgatgacacagccgcaaatctaatccacgtagttcccatttactccttaatctgattgatgttccctcttgcactgaataatacatgcctctctcaggtaagccattttataaaacaagaagataaaaagcactgttgaggcagtgtttgcttttgccgagctggtgtccgacagctccctgggtgtccggggtgggagagctgttgacagaagctctccgggccctcaggggcttagatcccacttgagtcgtaagccttcttgcttttgataacacagtattatttctcttactgtagaagaaaaagtttattaccaaacaagagtatttttatgaaagaaaaggacaaacctataaattaactcaacctatatctcccttgaaaatactttcaggctccaccaaaacgtagaactgaaagcatgtattttggaagaaagagatacattttgtatgctttcttttccttttgtagattcccagtttattttctaagactgcaaagatcactttgtcaccagccctgggacctgagaccaagggggtgtcttgtgggcagtgagggggtgaggagaggctggcatgaggttcagtcattccagtgagctccaaagaggggccacctgttctcaaaagcatgttggggaccaggaggtaaaactggccatttatggtgaacctgtgtcttggagctgacttactaagtggaatgagccgaggatttgaatatcagttctaaccttgatagaagaaccttgggttacatgtggttcacattaagaggatagaatcctttggaatcttatggcaaccaaatgtggcttgacgaagtcgtggtttcatctcttaaacacagtgtgtaaatttattcaactaacgatgggaaatgtattacttctgtacacagtggactgaagtgcaatttgttgaaagggaacaagtcattgaagagaaaaaaaaagcccaatacttagagtcccaattttgtctcatttgccaaaaaaaaaaaaaaaaaaaaagcaaaccccctatggttgatattgttataatgtatatactgtataatatgaaagagaatcgatgtatctcactttttcattatttgctaaccaaagctgtacatttttcatatgatctgcagccttttgggtatcaaatgggtcaaaaccatgggacctgccacctcccatcagcaattctggaaatgcactatttctactggtattcttgctttttttttttttttcattttcttgctgaaatgacatgaattgttgagtttatttttacacagtaaagagtggagaaagact

SEQ ID NO: 230 - DNA, 4062 bp, Homo sapiens
ctggacctgggcaccgccagccgcctgggcacgggactgggcgggggcgctgacctcggcctaggaggcccaggatcccggagacgcccgcgccctcaggaccctgcgggtcgcacgccctccccagcttctgctgctcgccgctcttcggcagggcgaggtcaggtgcccccttctcgcctctcttctcttctcttctcttcctcctccacttctgtgcccgcggagactccggccgcccccttccgcaggggtgtagtaatctgcggagctgacagcagccccgcagccaccctgcccgaagtctccggaagcggcacgagctcaggccgccgcagccccggcggacccactgttggacctgaggagccagccctcctcccgcacccaaacttggagcacttgacctttggctgttggagggggcaggctcgcgggtggctggacagctgcggagccgcgagggcatcttgcctggagaccgtcggctgcactcccgggctcctggctttgcctctgggatcccgaggtgtccacatcagacgcatgttgactgagacctagagtcatggatgtatgcgtccgtcttgccctgtggctcctctggggactcctcctgcaccagggccagagcctcagccatagtcacagtgagaaggcgacaggaaccagctcgggggccaactctgaggagtccactgcagcagagttttgccgaattgacaagcccctgtgtcacagtgaggatgagaaactcagcttcgaggcagtccgtaacatccacaaactgatggacgatgatgccaatggtgatgtggatgtggaagaaagtgatgagttcctgagggaagacctcaattaccatgacccaacagtgaaacacagcaccttccatggtgaggataagctcatcagcgtggaggacctgtggaaggcatggaagtcatcagaagtatacaattggaccgtggatgaggtggtacagtggctgatcacatatgtggagctgcctcagtatgaggagaccttccggaagctgcagctcagtggccatgccatgccaaggctggctgtcaccaacaccaccatgacagggactgtgctgaagatgacagaccggagtcatcggcagaagctgcagctgaaggctctggatacagtgctctttgggcctcctctcttgactcgccataatcacctcaaggacttcatgctggtggtgtctatcgttattggtgtgggcggctgctggtttgcctatatccagaaccgttactccaaggagcacatgaagaagatgatgaaggacttggaggggttacaccgagctgagcagagtctgcatgaccttcaggaaaggctgcacaaggcccaggaggagcaccgcacagtggaggtggagaaggtccatctggaaaagaagctgcgcgatgagatcaaccttgctaagcaggaagcccagcggctgaaggagctgcgggagggtactgagaatgagcggagccgccaaaaatatgctgaggaggagttggagcaggttcgggaggccttgaggaaagcagagaaggagctagaatctcacagctcatggtatgctccagaggcccttcagaagtggctgcagctgacacatgaggtggaggtgcaatattacaacatcaagaagcaaaatgctgagaagcagctgctggtggccaaggagggggctgagaagataaaaaagaagagaaacacactctttggcaccttccacgtggcccacagctcttccctggatgatgtagatcataaaattctaacagctaagcaagcactgagcgaggtgacagcagcattgcgggagcgcctgcaccgctggcaacagatcgagatcctctgtggcttccagattgtcaacaaccctggcatccactcactggtggctgccctcaacatagaccccagctggatgggcagtacacgccccaaccctgctcacttcatcatgactgacgacgtggatgacatggatgaggagattgtgtctcccttgtccatgcagtcccctagcctgcagagcagtgttcggcagcgcctgacggagccacagcatggcctgggatctcagagggatttgacccattccgattcggagtcctccctccacatgagtgaccgccagcgtgtggcccccaaacctcctcagatgagccgtgctgcagacgaggctctcaatgccatgacttccaatggcagccaccggctgatcgagggggtccacccagggtctctggtggagaaactgcctgacagccctgccctggccaagaaggcattactggcgctgaaccatgggctggacaaggcccacagcctgatggagctgagcccctcagccccacctggtggctctccacatttggattcttcccgttctcacagccccagctccccagacccagacacaccatctccagttggggacagccgagccctgcaagccagccgaaacacacgcattccccacctggctggcaagaaggctgtggctgaggaggataatggctctattggcgaggaaacagactccagcccaggccggaagaagtttcccctcaaaatctttaagaagcctcttaagaagtaggcaggatggggtggcagtaaagggacagcttgtccttccctgggtgttctgtctctccttccctcccttccttcaagataactggccccaagagtggggcatgggaagggctggtccaggggtctgggcactgtacatacctgccccctcatccttgggtccttcattattatttattaactgaccaccatggcctgcctgccctgcctccgtcccaaccatgggctgctgctgtcactccctctccacttcagtgcatgtcttagttgctgttccctcagctcccagctccacctctggggttcagcttctgtctctgctgtcccagttttgaggtttggtttcttgtttctgtctcttgctttcgggctcctccctcccaccactccccaacttcccctagcagttgcagggaagataggacgagtagcttctgacatgtgtgcctcagatctgttccaccccactcacagtggttctgtttgctccagactggggctagggcctaatctttgaagtttgttctttggtattgatgtgggtcagaaggagcctcatcctaatctcactcaggcctccagggatccatgggggagtgaaaccaattctcagagaacaacccaccagagacttttaaagagaggccaggcttgggaatgggttgggagaggcatctgttcattggagcatgagtggatgccagaactgtaggttataaggcagtcactttttctctctactcccacccacacctgcctccctcttacccctgctcccccacactgcaggaggatttgtctctaagaggtgctgccccaaagctccccaagcatcaatactcctagggctcaggacaagtggctcccctggccaggagagccacagccatgatacagggctcttatggagccctggagttgttgggcaaggatgctgtcattttttgaaccaaaagacaaacaggttaaaaggaaaaaaagtaatctgaatttcccaagtgcctacgctgcatattccccttgttagatcccattttcatgttactttgtagccttggccagaggctcaaaaaggacacaaccagtttggggaaggggtggctaaggaagatggtataggtgaaggcggctgtgtgaccactttcccccacccttcccaccctctagacaactctctcccttacctgtttttgctatggctgtaaaggtatttttcctctgccccactccctgccatacctttatcctgggatcctattttgggcctggggtgggtatacctggggctggtcttaggagggtgctaggctgcagactgccttgtactccctggacaccctcaaatggggttttctgtgttatttcataaaattctttgaagtccaataaagcatgtaggagattttaaccactaaaaaaaaaaaaaaaaaaaaaaaa

SEQ ID NO: 231 - DNA, 3352 bp, Homo sapiens
ctctgtggttcgggtccgctttcgtctccgtcctgctgccgttaccgccgctgctgccgccgcttgcgtcccccgctccggtctgtggtgcagccgggacccaggaccatgtctctgtctcgctcagaggagatgcaccggctcacggaaaatgtctataagaccatcatggagcagttcaaccctagcctccggaacttcatcgccatggggaagaattacgagaaggcactggcaggtgtgacgtatgcagccaaaggctactttgacgccctggtgaagatgggggagctggccagcgagagccagggctccaaagaactcggagacgttctcttccagatggctgaagtccacaggcagatccagaatcagctggaagaaatgctgaagtcttttcacaacgagctgcttacgcagctggagcagaaggtggagctggactccaggtatctgagtgctgcgctgaagaaataccagactgagcaaaggagcaaaggcgacgccctggacaagtgtcaggctgagctgaagaagcttcggaagaagagccagggcagcaagaatcctcagaagtactcggacaaggagctgcagtacatcgacgccatcagcaacaagcagggcgagctggagaattacgtgtccgacggctacaagaccgcactgacagaggagcgcaggcgcttctgcttcctggtggagaagcagtgcgccgtggccaagaactccgcggcctaccactccaagggcaaggagctgctggcgcagaagctgccgctgtggcaacaggcctgtgccgaccccagcaagatcccggagcgcgcggtgcagctcatgcagcaggtggccagcaacggcgccaccctccccagcgccctgtcggcctccaagtccaacctggtcatttccgaccccattccgggggccaagcccctgccggtgccccccgagctggcaccgttcgtggggcggatgtctgcccaggagagcacacccatcatgaacggcgtcacaggcccggatggcgaggactacagcccgtgggctgaccgcaaggctgcccagcccaaatccctgtctcctccgcagtctcagagcaagctcagcgactcctactccaacacactccccgtgcgcaagagcgtgaccccaaaaaacagctatgccaccaccgagaacaagactctgcctcgctcgagctccatggcagccggcctggagcgcaatggccgtatgcgggtgaaggccatcttctcccacgctgctggggacaacagcaccctcctgagcttcaaggagggtgacctcattaccctgctggtgcctgaggcccgcgatggctggcactacggagagagtgagaagaccaagatgcggggctggtttcccttctcctacacccgggtcttggacagcgatggcagtgacaggctgcacatgagcctgcagcaagggaagagcagcagcacgggcaacctcctggacaaggacgacctggccatcccaccccccgattacggcgccgcctcccgggccttccccgcccagacggccagcggcttcaagcagaggccctacagtgtggccgtgcccgccttctcccagggcctggatgactatggagcgcggtccatgagcagcgccgatgtggaagtggccagattctgagccgcctgactagagttagaatccctttgcccacgtccagctgaagccgacagtgaccaacgacaggtctgcccccctcctcagctgatggccacatctgcagtgctgcccatctggtggcttcccccgcccttcccatgtagcctgttctgtcatcatctgtgcgttcctgtgtagagaacatccaggccccggctgcctggtcttgccccacttgagtctggcctggactggatcccagctgttctaggcagggccgggcagagtggggcgcaggcccctgaagggcgagacccagtggctgggctgcccagggctgaggggccgcctcttgagggtacacgcctctggtcacatggccatggagccttgggtacccctgagttaagggaggacatttggccagctggtggctgggaggggagcctggctgccctgctgcttctcctgcctaataaacaggcttctcctgcaccaggtgtgatctgtccgcccaagggccagaaggccgggagcacggggatgggagcgcccgcaccctggctggaagatgaacttcccgtaagcacgtaattccctgcaggtccggcagctacacctggagtgtggggcctggtccctccccatgcccctcggtggggctctcctgggcccctcactcccactggcaatgtcacaagggcctccccaggcccctcctgcctcgggcaggccccagccctcctccttacccaacctcccatccagaaccttgctgccagggcctcccagctcgctcctgcggccaaaggccagctgtcaggtgctatgcggggtcaccagcagagtgcccgctggcaggtgggggcttccccgcttccggggtctgccccaggactcctgggtggacctcccccccccacctccgctgactcctgcaggcactggggagctctgctggaattgggggttttaaaacttcattagcagatttgtgctcttccatactgtttgtttgtttgttaggtgaaatacagtgtggtgagctgcactggtgacaacagcccttacctggctggggaggtgtctccagcagagctcactcccgcctacagccactcacaccccggggacaggaagctgtagagttggcgggccaggagggcagttgagagctggccagcggagggtgcagggaagcccagctgtgctcaactctcctgcctccgccttccaccctgggcccagggacagacagacattgccctcagaagggcagggaggaggctgtcctggagaggcctgtaggtccattcttcacccgtccctaccaggccaactcggcctgcaggaagggagacctgcagggcgctacccctgcgcccccacacacagtagggccagaacaccatcccctccaccggggtgtgccgaggacagtggggaggagaggagaggggcagcttcctcctggccccaggaagggctggcatcgggttcctggcacagcccctcctgtccaggactttatcatcggcagacctcagaagacaacacacaaaggtttcttttgtcttagcttcatttctcttaaaaaacaaggaacaagaaaacattgcaccagcgttctaagcctcaaacaaaacacaaaacaaatccccctgcgaagcaacaataaactttacatctctttggcaacaat

SEQ ID NO: 232 - DNA, 5059 bp, Homo sapiens
ctttgcgcacgcgcgccgcttcccagtggcaagcgcgggcaggaccgcgttgcgtcatcggggcgcgcgcctcagagagagctgtggttgccggaagttgagcggcggcaagaaataatggcggcagctacgggggatcctggactctctaaactgcagtttgccccttttagtagtgccttggatgttgggttttggcatgagttgacccagaagaagctgaacgagtatcggctggatgaagctcccaaggacattaagggttattactacaatggtgactctgctgggctgccagctcgcttaacattggagttcagtgcttttgacatgagtgctcccaccccagcccgttgctgcccagctattggaacactgtataacaccaacacactcgagtctttcaagactgcagataagaagctccttttggaacaagcagcaaatgagatatgggaatccataaaatcaggcactgctcttgaaaaccctgtactcctcaacaagttcctcctcttgacatttgcagatctaaagaagtaccacttctactattggttttgctatcctgccctctgtcttccagagagtttacctctcattcaggggccagtgggtttggatcaaaggttttcactaaaacagattgaagcactagagtgtgcatatgataatctttgtcaaacagaaggagtcacagctcttccttacttcttaatcaagtatgatgagaacatggtgctggtttccttgcttaaacactacagtgatttcttccaaggtcaaaggacgaagataacaattggtgtatatgatccctgtaacttagcccagtaccctggatggcctttgaggaattttttggtcctagcagcccacagatggagtagcagtttccagtctgttgaagttgtttgcttccgtgaccgtaccatgcagggggcgagagacgttgcccacagcatcatcttcgaagtgaagcttccagaaatggcatttagcccagattgtcctaaagcagttggatgggaaaagaaccagaaaggaggcatgggaccaaggatggtgaacctcagtgaatgtatggaccctaaaaggttagctgagtcatcagtggatctaaatctcaaactgatgtgttggagattggttcctactttagacttggacaaggttgtgtctgtcaaatgtctgctgcttggagccggcaccttgggttgcaatgtagctaggacgttgatgggttggggcgtgagacacatcacatttgtggacaatgccaagatctcctactccaatcctgtgaggcagcctctctatgagtttgaagattgcctagggggtggtaagcccaaggctctggcagcagcggaccggctccagaaaatattccccggtgtgaatgccagaggattcaacatgagcatacctatgcctgggcatccagtgaacttctccagtgtcactctggagcaagcccgcagagatgtggagcaactggagcagctcatcgaaagccatgatgtcgtcttcctattgatggacaccagggagagccggtggcttcctgccgtcattgctgcaagcaagagaaagctggtcatcaatgctgctttgggatttgacacatttgttgtcatgagacatggtctgaagaaaccaaagcagcaaggagctggggacttgtgtccaaaccaccctgtggcatctgctgacctcctgggctcatcgctttttgccaacatccctggttacaagcttggctgctacttctgcaatgatgtggtggccccaggagattcaaccagagaccggaccttggaccagcagtgcactgtgagtcgtccaggactggccgtgattgcaggagccctggccgtggaattgatggtatctgttttgcagcatccagaagggggctatgccattgccagcagcagtgacgatcggatgaatgagcctccaacctctcttgggcttgtgcctcaccagatccggggatttctttcacggtttgataatgtccttcccgtcagcctggcatttgacaaatgtacagcttgttcttccaaagttcttgatcaatatgaacgagaaggatttaacttcctagccaaggtgtttaattcttcacattccttcttagaagacttgactggtcttacattgctgcatcaagaaacccaagctgctgagatctgggacatgagcgatgatgagaccatctgagatggccccgctgtggggctgacttctccccggccgcctgctgaggagctctccatcgccagagcaggactgctgaccccaggcctggtgattctgggcccctcctccataccccgaggtctgggattcccccctctgctgcccaggagtggccagtgttcggcgttgctcgggattcaagataccaccagttcagagctaaataataaccttggccttggccttgctattgacctgggacttggtcctccatgcagtttttatttcttgtcacagtgactgatagccatcccccaggatcctttccccttggccctgagggggtgacccaacacagaccaaatggggaaatgagcaaccagctcctgcccagagccactgcgggaggtggcaccctcatccccggaatgtgctgcccaccgcaccgcaggctcctcctgtgggggccctgggcatgggtgagggtgggaccccgtgagcgcactgcaccctggccctggtggagcgggaggaggaggagagccgagctgggtacgagactaaagggcccacatgacccagtgacgccagatttccaccaaggactgagtgagctgctcagacatggctttctgcctcccagcctgtcctccactgtgggcatagcatctgtgcctgcctgcctgcttgagggagaggagtttctgctgctgccttgagctggggggaagagcccaggggcagatcctggcagctgcctggatggggctcctccctgcccttatgagcaggccaggcccagaaaggccgagcctgggctgccttcctgccccagccgagggaggggtcagacggctctaccatgggtaactcaggcaagagctggttttcctctttattctgggtgtgtgcagctgtgaggccccaacccaggagaggccatggcctaggtacctgtgaccaccctgcccccgtgtagagggcatcgtctttcctgctattttattctttcagcttttgtcttaggcccagaatcaaagtgaaaattgagtcgagctgacccttacaacagtaggatttagtagggtagatttcaaatgaggcttcgcttctcccaaagtagccagtccaagttccagtggctgtcgttcagctcatgggagcttcatggggacacagccggcacaggtgcagggcccgagtccgcccacccagcctggcgctgaaactgcacacgtacactatgtggtttaagagcactttattattgttcttaaggctacttttaagtacaaaaaaagatggcctgccaaacctttttttttcttcttccaggaaaaacaggccacagagaatggtatattacagatttacacacatgaagagaaggtcagagcgcactgcaggcagcgcggctctgggaagaacttcacggagccccttcttagagcagggagggggctttctcagtgaaatgtttggttttctgctgcctcctctgccccaggcccccctccagggtactgcctatcccagataggtcagtgcaccagggacccggccgccagcaccgccgacccctcccagagtgacgcccttgttcactgacaaagagacctgtcccaggagtgtcctccaccgagccggtcagctgtgggtggttttcctgttacgacgctcagtagcctgtagcaataacaaactcgtggctatgaatgcagatgcagtgttctcatagaataactgttcctgcacttttacagacaaatctacgacaaaaaaaaagatcaactttttttttccgaacaacaaaaaaaatgaatgattacaataggaaagggaaaaattaaatagctacatatcattaacaaattaatgttcttcaaaaaatacctacaaatttctctgtacattctttacgcacagcgtaacgatggtctcaaaatcacccatatagaaaagtgttctcaacgatttttcctacagaaaatataggggcctgaatgccaaagcttggaagcccagtacagtgggagtgaaatgtgtgcggggcaaggagaagggcttttctttcctccacttttcaaaggcctgcagccactctgtgactacaagagccagtcctccgaccttttcacccagtgccaatttccaaaattcaacagctaaaaactgtaaaaccgggggtcatacggtgtgcagagtccacaaagccttgcaggtgaggtgaccacgcccacgtcacctggtcaggtgccatcgtcgtgagcctctggtgggccaggtgggacacagcacaccccagggggaggggatagaaacgctcattgaccaaaaaggagcagctgtgacctccacagctgtgtctgtcatgcttgcttcatctaatttctagttagtagctattaatatagcaaataataaatgcagtaataacagtataaagtcagaggaatgtatactgccttggccccagcgtacgaggaagcgtataaaacaccatatcacagattgtctgtcagtaatctgctgttcagccaagagagttcaaagggagcagtttctgcatgtagggaagttggaagacacaaaccccacctcccctgggagcttgtaacaaagcagacagggatgcaaaaataaatgatgtcagcctgcagccaaactccagcatcccacaccgcagctgacccactgctcatcgcgagggcctgccaggagctggcctcccgcactacttgtgagtaaagtgaatatcaaataccaatcttagagtacaactgtaccagcagtaagtatatctaggactgtaactgacaaaaataaactaattctgaaaagaaaaaaaaaa

SEQ ID NO: 233 - DNA, 7047 bp, Homo sapiens
agcctcagacgctgcgtggagcggcggagccggagggaagcaaaggaccgtctgcgctgctgtccccgccccgcgcgctctgcgcccctcgtccctggcggtcgctccgaagctcagccctcttgcctgccccggagctgtcccgggctagccgagaagagagcggccggcaagtttgggcgcgcgcaggcggcgggccgcgggcactgggcgcctcgctggggcggggggaggtggctaccgctcccggcttggcgtcccgcgcgcacttcggcgatggcttttccgccgcggcgacggctgcgcctcggtccccgcggcctcccgcttcttctctcgggactcctgctacctctgtgccgcgccttcaacctagacgtggacagtcctgccgagtactctggccccgagggaagttacttcggcttcgccgtggatttcttcgtgcccagcgcgtcttcccggatgtttcttctcgtgggagctcccaaagcaaacaccacccagcctgggattgtggaaggagggcaggtcctcaaatgtgactggtcttctacccgccggtgccagccaattgaatttgatgcaacaggcaatagagattatgccaaggatgatccattggaatttaagtcccatcagtggtttggagcatctgtgaggtcgaaacaggataaaattttggcctgtgccccattgtaccattggagaactgagatgaaacaggagcgagagcctgttggaacatgctttcttcaagatggaacaaagactgttgagtatgctccatgtagatcacaagatattgatgctgatggacagggattttgtcaaggaggattcagcattgattttactaaagctgacagagtacttcttggtggtcctggtagcttttattggcaaggtcagcttatttcggatcaagtggcagaaatcgtatctaaatacgaccccaatgtttacagcatcaagtataataaccaattagcaactcggactgcacaagctatttttgatgacagctatttgggttattctgtggctgtcggagatttcaatggtgatggcatagatgactttgtttcaggagttccaagagcagcaaggactttgggaatggtttatatttatgatgggaagaacatgtcctccttatacaattttactggcgagcagatggctgcatatttcggattttctgtagctgccactgacattaatggagatgattatgcagatgtgtttattggagcacctctcttcatggatcgtggctctgatggcaaactccaagaggtggggcaggtctcagtgtctctacagagagcttcaggagacttccagacgacaaagctgaatggatttgaggtctttgcacggtttggcagtgccatagctcctttgggagatctggaccaggatggtttcaatgatattgcaattgctgctccatatgggggtgaagataaaaaaggaattgtttatatcttcaatggaagatcaacaggcttgaacgcagtcccatctcaaatccttgaagggcagtgggctgctcgaagcatgccaccaagctttggctattcaatgaaaggagccacagatatagacaaaaatggatatccagacttaattgtaggagcttttggtgtagatcgagctatcttatacagggccagaccagttatcactgtaaatgctggtcttgaagtgtaccctagcattttaaatcaagacaataaaacctgctcactgcctggaacagctctcaaagtttcctgttttaatgttaggttctgcttaaaggcagatggcaaaggagtacttcccaggaaacttaatttccaggtggaacttcttttggataaactcaagcaaaagggagcaattcgacgagcactgtttctctacagcaggtccccaagtcactccaagaacatgactatttcaagggggggactgatgcagtgtgaggaattgatagcgtatctgcgggatgaatctgaatttagagacaaactcactccaattactatttttatggaatatcggttggattatagaacagctgctgatacaacaggcttgcaacccattcttaaccagttcacgcctgctaacattagtcgacaggctcacattctacttgactgtggtgaagacaatgtctgtaaacccaagctggaagtttctgtagatagtgatcaaaagaagatctatattggggatgacaaccctctgacattgattgttaaggctcagaatcaaggagaaggtgcctacgaagctgagctcatcgtttccattccactgcaggctgatttcatcggggttgtccgaaacaatgaagccttagcaagactttcctgtgcatttaagacagaaaaccaaactcgccaggtggtatgtgaccttggaaacccaatgaaggctggaactcaactcttagctggtcttcgtttcagtgtgcaccagcagtcagagatggatacttctgtgaaatttgacttacaaatccaaagctcaaatctatttgacaaagtaagcccagttgtatctcacaaagttgatcttgctgttttagctgcagttgagataagaggagtctcgagtcctgatcatatctttcttccgattccaaactgggagcacaaggagaaccctgagactgaagaagatgttgggccagttgttcagcacatctatgagctgagaaacaatggtccaagttcattcagcaaggcaatgctccatcttcagtggccttacaaatataataataacactctgttgtatatccttcattatgatattgatggaccaatgaactgcacttcagatatggagatcaaccctttgagaattaagatctcatctttgcaaacaactgaaaagaatgacacggttgccgggcaaggtgagcgggaccatctcatcactaagcgggatcttgccctcagtgaaggagatattcacactttgggttgtggagttgctcagtgcttgaagattgtctgccaagttgggagattagacagaggaaagagtgcaatcttgtacgtaaagtcattactgtggactgagacttttatgaataaagaaaatcagaatcattcctattctctgaagtcgtctgcttcatttaatgtcatagagtttccttataagaatcttccaattgaggatatcaccaactccacattggttaccactaatgtcacctggggcattcagccagcgcccatgcctgtgcctgtgtgggtgatcattttagcagttctagcaggattgttgctactggctgttttggtatttgtaatgtacaggatgggcttttttaaacgggtccggccacctcaagaagaacaagaaagggagcagcttcaacctcatgaaaatggtgaaggaaactcagaaacttaactgcagtttttaagttatgctacatcttgacccactagaattagcaactttattatagatttaaactttcttcatgaggagtaaaaatccaaggctttactgctgatagtgctaattggcattaaccacaaaatgagaattatatttgtcaaccttctccttataaataagttcagacatacatttaataacatagggtgacttgtgtttttaggtatttaaataataaaatttcaagggatagtttttattcaatgtatataagacaggtagtgcctgatttactactttatataaaatagtacctccttcagttactgtttctgatttaatgtacggaactttatttgttgttgttgttgttgttgttgttgttgttttaaagcagtccaaatttggaccttagcaatcatgtcttttgtataggtacttaatgttaatacatattacactacagtttacttttcagaatactaaagactttataactgcatgaacttggatttttttaatcactcatatggtagaattttataaacacatacatgataccatccaaattcttgcttttaataacaaaggtacaatattttgttttagtatgaaaatctggtagatcctattacacttctgtttatattaaatccacaatattttattacatttttaacttgtataaattttaggtcaaatccttcaagccaacctatactaaaaattagttccataatcacaaatggctcttttgtgtaattgtttaatttcacctgaatatcataatgcttaaagccatatggagttggaaattatttccaaagcatatttattccattgttttagtctggctatttacagtataaaaaaagcatttttattaaaatactgtgtagttctttgagatagttgcttatgcatatagtaagtattacattcttagagtagagcagagtttttagttagtattaatttattttcctccattcatgtacttttccttatatttccaaaactgttactgagaatgggtcaagatcagtgagaaatctttacagttgacaggaacctggaccccttaccccaactttatgagtaatgcttggaataaaaactcttaaggcaactcactgatttacttctagcaatagcatgatgttacaggaatattacctctgtttaagcaaggtaatgtgtaaaatcagtctcggctgtcagaataacttctaaaaggtatttttataagcagttcaagttactgaaaaccttttaaacctttctgaagttcgttagtataaattacttttctaggattattaataaaagccacataggtggcaagttgtagttttatatggctctgtagagtggtgaaccttctagaggaatatatgatttattcacagttcctcaaggcctggggatgatgatcagttatacctatttttgtgcaattacatcatgttgtacattagaaatggagagtttaatagctctttaactgctgtcctcattaggtaatgataaatatttcccttaaataattgactattttgctgtgttttaaaaatgattgaaatttatcttgccatatctcataatttcatgcacaagttgactgagctaatcttgagaatatattcgtaaaataggagcacatttagttgaggtatacaaggtaggactctagacaaaaccttctattttagctttagtgaatttcaaaagtaatgggtcttggagtatagatttttattagtagcttgaaagagcttaatcatatgcagtaagtatttttattaccaataaatttaaaattttttaagaaaaatatttttatcctagggccaagtgttgcctgccaccaatcagtaagttagtctataacaaattttaccctaacagttttaccacctagtaacagtcatttctgaaaatatgttggatagaaagtcactctttggcaaaagtgttagaatttgcttttgtgccatctattccttttatggcatctatcttgaaagtaatcttgtattggagattgaaagatgctgtaatttagaaattaacatgatatcttaaattacctttatgaaatatagttttgtataatagcatagattttccttcaaaaaatgaacatttatatatctacaaaaatatggagaagagtaatttgaaagcctactttctgaagaaaatggtgggatttttttttatcatgattaaatatcaaaaaattgccctatgaaaactttaaatctctaaaacatttgaaatactaccatatttgtgatttattgagaataaaaatccattttgaaatgtaaaatttttatgatctgattcagttttaagaaaacatgaatgaactagaagatattaaaaacatttgacattggtaagaaatattgatactgatattgatttttatataggtatttatttcagaattgatattttgagaaaaatacatgtgagtcattttttctgtttctcttttctcttaacgattatcactgtaattctgaatctgaaaggtaaaacaattagtcaaaatattattgccatcattctacctgtgttatgaaactacttattcatagttaattctcattaacacttacatttccataaagaaaactcaagtattaataaaagagactttactggcttaagagggctgtgaaagatttttgatagtgaatcatgaccctaagggagagatttgtgtgataaaagtattgtatataatagatcagcgatttttgtaaggcaaacagaatttgtaagttggcagatcttcctaagttgcaaaatgtaatgatgagcttggtggagaagaatgagtcgttcttggaatacctatgtgcagccactacccatctcaatgtcaccttgtttgcattcttggatagcttgtatatgtagtagtttgatgaataatttaaagaaaaacacctaaaatttgaaaaatgattgtaggatcaaaaaaggcagatgaaattacttaatactcagtgttttggagagtattccttttagtttgttggttggctggtttgaacgatagaaatatgcagcatgcaatatatgcttatatttcattttaatttctgatatataatgaacttcttgggagaggtactgaatctttgatgttttttgtcattgttctcaagtgcaatataacaatgtaaccaaatctagataatttcaaagttgtcattaatttagtaagcctaatataaacaaatatttgtattatttttgttagcaggaaagagtgattaagtgaggttatttacccctaaatggtccattctgcattgtatttcaggctggaaatgaattattctttaccagttttgaaacactttgaaatatcctaaggtaacttggaagctgtgtagtatatcaaattaatttgctacctaataacatagaaagtaaatatctttgtggtcacccacattgggtgagacagaaaatgaatctgttctaaaatttgtaatttgctaacttgatttgagttagtgaaaactggtacagtgttctgcttgatttacaacatgtaacttgtgactgtacaataaacataagcatatggtaccaaaaaaaaaaaaaaaa

SEQ ID NO: 234 - DNA, 2595 bp, Homo sapiens
agcgcgcaggcgcggccggattccgggcagtgacgcgacggcgggccgcgcggcgcatttccgcctctggcgaatggctcgtctgtagtgcacgccgcgggcccagctgcgaccccggccccgcccccgggaccccggccatggacgaactgttccccctcatcttcccggcagagccagcccaggcctctggcccctatgtggagatcattgagcagcccaagcagcggggcatgcgcttccgctacaagtgcgaggggcgctccgcgggcagcatcccaggcgagaggagcacagataccaccaagacccaccccaccatcaagatcaatggctacacaggaccagggacagtgcgcatctccctggtcaccaaggaccctcctcaccggcctcacccccacgagcttgtaggaaaggactgccgggatggcttctatgaggctgagctctgcccggaccgctgcatccacagtttccagaacctgggaatccagtgtgtgaagaagcgggacctggagcaggctatcagtcagcgcatccagaccaacaacaaccccttccaagttcctatagaagagcagcgtggggactacgacctgaatgctgtgcggctctgcttccaggtgacagtgcgggacccatcaggcaggcccctccgcctgccgcctgtcctttctcatcccatctttgacaatcgtgcccccaacactgccgagctcaagatctgccgagtgaaccgaaactctggcagctgcctcggtggggatgagatcttcctactgtgtgacaaggtgcagaaagaggacattgaggtgtatttcacgggaccaggctgggaggcccgaggctccttttcgcaagctgatgtgcaccgacaagtggccattgtgttccggacccctccctacgcagaccccagcctgcaggctcctgtgcgtgtctccatgcagctgcggcggccttccgaccgggagctcagtgagcccatggaattccagtacctgccagatacagacgatcgtcaccggattgaggagaaacgtaaaaggacatatgagaccttcaagagcatcatgaagaagagtcctttcagcggacccaccgacccccggcctccacctcgacgcattgctgtgccttcccgcagctcagcttctgtccccaagccagcaccccagccctatccctttacgtcatccctgagcaccatcaactatgatgagtttcccaccatggtgtttccttctgggcagatcagccaggcctcggccttggccccggcccctccccaagtcctgccccaggctccagcccctgcccctgctccagccatggtatcagctctggcccaggccccagcccctgtcccagtcctagccccaggccctcctcaggctgtggccccacctgcccccaagcccacccaggctggggaaggaacgctgtcagaggccctgctgcagctgcagtttgatgatgaagacctgggggccttgcttggcaacagcacagacccagctgtgttcacagacctggcatccgtcgacaactccgagtttcagcagctgctgaaccagggcatacctgtggccccccacacaactgagcccatgctgatggagtaccctgaggctataactcgcctagtgacaggggcccagaggccccccgacccagctcctgctccactgggggccccggggctccccaatggcctcctttcaggagatgaagacttctcctccattgcggacatggacttctcagccctgctgagtcagatcagctcctaagggggtgacgcctgccctccccagagcactgggttgcaggggattgaagccctccaaaagcacttacggattctggtggggtgtgttccaactgcccccaactttgtggatgtcttccttggaggggggagccatattttattcttttattgtcagtatctgtatctctctctctttttggaggtgcttaagcagaagcattaacttctctggaaaggggggagctggggaaactcaaacttttcccctgtcctgatggtcagctcccttctctgtagggaactctggggtcccccatccccatcctccagcttctggtactctcctagagacagaagcaggctggaggtaaggcctttgagcccacaaagccttatcaagtgtcttccatcatggattcattacagcttaatcaaaataacgccccagataccagcccctgtatggcactggcattgtccctgtgcctaacaccagcgtttgaggggctggccttcctgccctacagaggtctctgccggctctttccttgctcaaccatggctgaaggaaaccagtgcaacagcactggctctctccaggatccagaaggggtttggtctgggacttccttgctctccctcttctcaagtgccttaatagtagggtaagttgttaagagtgggggagagcaggctggcagctctccagtcaggaggcatagtttttactgaacaatcaaagcacttggactcttgctctttctactctgaactaataaatctgttgccaagctggctagaaaaaaaaaaaaaaaaaa

SEQ ID NO: 235 - DNA, 1342 bp, Homo sapiens
cttcaagccactgaagatggaaaacgagacagtcagtgaactgaaccaaacacagcttcagccacgagcagtggtggccttagaataccaggtggtcaccatcttacttgtactcattatttgtggcctgggcattgtaggcaacatcatggtagtcctggttgtcatgagaaccaagcacatgaggacccccacaaactgctacctggtgagcctggcagtagctgatctcatggtcttggtggccgcaggcctccccaacataacagacagtatctacggttcctgggtctatggctatgttggatgcctctgcattacttacctccagtatttgggaattaatgcatcctcttgttcaataacagcctttaccattgagaggtacatagcaatctgtcaccccatcaaagcccagtttctctgcacattttccagagccaaaaagattatcatctttgtctgggctttcacatctctttactgtatgctctggttcttcttgctggatctcaatattagcacctacaaagatgctattgtgatatcctgtggctacaagatctccaggaattactactcacctatttacctaatggactttggtgtcttttatgttgtgccaatgatcctggctaccgtcctctatggattcatagctagaatccttttcttaaatcccattccttcagatcctaaagaaaactctaagacatggaaaaatgattcaacccatcagaacacaaatctgaatgtaaatacctctaatagatgtttcaacagcacagtatcttcaaggaagcaggtcaccaagatgctggcagtggttgtaattctgtttgcccttttatggatgccctacaggactctagtggttgtcaactcatttctctccagtcctttccaagaaaattggtttttgctcttttgcagaatttgcatttatctcaacagtgccatcaacccggtgatttacaatctcatgtcccagaaattccgtgcagccttcagaaagctctgcaactgcaagcagaagccaacagagaaacctgctaactacagtgtggccctaaattacagcgtcatcaaggagtcagaccatttcagcacagagcttgatgatatcactgtcactgacacttacctgtctgccacaaaagtgtcttttgatgacacctgcttggcttctgaggtatcctttagccaaagttgattcatgaattagaagaaaatggatgacaaagaaattgagaatctgtgcagtcatcaacaaaagggagaacatggccaatagtcatatgtgaagacagagcagatcagtctttgtcaatgctctaacaaa

SEQ ID NO: 236 - DNA, 1800 bp, Homo sapiens
ccaataggcagagccctaggacctgcccacgtctggttcaggggctagaaaagagcgtcgatgccggcggcagtgatgagtcctaggaggcgctggctctttggcggctcggaggagcggctgctgctgctgctgctgctgctggtggcccctttgcagatgtattgctgtccttgaatattagcccatttgaaaacgcctgggaagttcagccatcagtatgtccaagtacaaacttattatgttaagacatggagagggtgcttggaataaggagaaccgtttttgtagctgggtggatcagaaactcaacagcgaaggaatggaggaagctcggaactgtgggaagcaactcaaagcgttaaactttgagtttgatcttgtattcacatctgtccttaatcggtccattcacacagcctggctgatcctggaagagctaggccaggaatgggtgcctgtggaaagctcctggcgtctaaatgagcgtcactatggggccttgatcggtctcaacagggagcagatggctttgaatcatggtgaagaacaagtgaggctctggagaagaagctacaatgtaaccccgcctcccattgaggagtctcatccttactaccaagaaatctacaacgaccggaggtataaagtatgcgatgtgcccttggatcaactgccacggtcggaaagcttaaaggatgttctggagagactccttccctattggaatgaaaggattgctcccgaagtattacgtggcaaaaccattctgatatctgctcatggaaatagcagtagggcactcctaaaacacctggaaggtatctcagatgaagacatcatcaacattactcttcctactggagtccccattcttctggaattggatgaaaacctgcgtgctgttgggcctcatcagttcctgggtgaccaagaggcgatccaagcagccattaagaaagtagaagatcaaggaaaagtgaaacaagctaaaaaatagtctttctcaactgttggctaagaagaaatgcaaaagaagtggcataggagtgtgttatgggtgctgaactctctctctttttccccgattttccagagctaggctgtggagtagagtttgtataggtaactaggtaacttattgtggcccagataaggctttaggatgcctcagtgcttatgtcatagccttatgagttagctttcttgctagccccctagtcggtcaccaaactagtaactagtggggcttaatgaaggtcataagtttctgagatgggagagcaacaagtagagatgaagttaaaggtatttatcattcaagaaatcattattgagtcaccattgacaggcactattctaatcagtagttcactttaatatttaataagattttctgggataacagtaagggatattagataatataccgtatgtatttattactagtcttttcctctaggaaaagggatactttgataattaaggccagaggcccattagttgagaaagtcacagatatatttctccaagaaagccaacaaccaccaccacaatgacagaaatgacaacaaggccctttaacttgtcttctagtttagagacatccttcatttgacatttagtagaattcctctttggccacaagaataagcagcaaataaacaactatggctgttgaggttctcattttggtttgttttaattttttgaactttgggtacctgtaattagtttaaaaataaagttcctgataataaagtgactgaaaatggcatccccaaaaaaaaaaaaaaaaaa

SEQ ID NO: 237 - DNA, 11571 bp, Homo sapiens
ctcggcgggggcccgctcccaggcccgctcccgagcccgttccgctcccgtccgccttcttctcgccttctctccgcgtggctcctccgtcccggcgtctccaaaactgaatgagcgagcggcgcgtagggcgcgcggcggcggcggcggcggcggcggcatggagcgcagtggctgggcccggcagactttcctcctagcgctgttgctgggggcgacgctgagggcgcgcgcggcggctggctattacccccgcttttcgcccttctttttcctgtgcacccaccacggggagctggaaggggatggggagcagggcgaggtgctcatttccctgcatattgcgggcaaccccacctactacgttccgggacaagaataccatgtgacaatttcaacaagcaccttttttgacggcttgctggtgacaggactatacacatctacaagtgttcaggcatcacagagcattggaggttccagtgctttcggatttgggatcatgtctgaccaccagtttggtaaccagtttatgtgcagtgtggtagcctctcacgtgagtcacctgcccacaaccaacctcagtttcatctggattgctccacctgcgggcacaggctgtgtgaatttcatggctacagcaacacaccggggccaggttattttcaaagatgctttagcccagcagttgtgtgaacaaggagctccaacagatgtcactgtgcacccacatctagctgaaatacatagtgacagcattatcctgagagatgactttgactcctaccaccaactgcaattaaatccaaatatatgggttgaatgtaacaactgtgagactggagaacagtgtggcgcgattatgcatggcaatgccgtcaccttctgtgaaccatatggcccacgagaactgattaccacaggccttaatacaacaacagcttctgtcctccaattttccattgggtcaggttcatgtcgctttagttattcagaccccagcatcatcgtgttatatgccaagaataactctgcggactggattcagctagagaaaattagagccccttccaatgtcagcacaatcatccatatcctctaccttcctgaggacgccaaaggggagaatgtccaatttcagtggaagcaggaaaatcttcgtgtaggtgaagtgtatgaagcctgctgggccttagataacatcttgatcatcaattcagctcacagacaagtcgttttagaagatagtctcgacccagtggacacaggcaactggcttttcttcccaggagctacagttaagcatagctgtcagtcagatgggaactccatttatttccatggaaatgaaggcagcgagttcaattttgccaccaccagggatgtagatctttccacagaagatattcaagagcaatggtcagaagaatttgagagccagcctacaggatgggatgtcttgggagctgtcattggtacagaatgtggaacgatagaatcaggcttatcaatggtcttcctcaaagatggagagaggaaattatgcactccatccatggacactaccggttatgggaacctgaggttttactttgtgatgggaggaatttgtgaccctggaaattctcatgaaaatgacataatcctgtatgcaaaaattgaaggaagaaaagagcatataacactggataccctttcctattcctcatataaggttccgtctttggtttctgtggtcatcaatcctgaacttcagactcctgctaccaaattttgtctcaggcaaaagaaccatcaaggacataataggaatgtctgggctgtagactttttccatgtcttgcctgttctcccttctacaatgtctcacatgatacagttttccatcaatctgggatgtggaacgcatcagcctggtaacagtgtcagcttggaattttctaccaaccatgggcgctcctggtccctccttcacactgaatgcttacctgagatctgtgctggaccccacctcccccacagcactgtctactcctctgaaaactacagtgggtggaaccgaataacaattccccttcctaacgcagcactaacccggaacaccaggattcgctggagacaaacaggaccaatccttggaaacatgtgggcaattgataatgtttatattggcccgtcatgtctcaaattctgttctggcagaggacagtgcactagacatggttgcaagtgtgaccctggattttctggcccagcttgtgagatggcatcccagacattcccaatgtttatttctgaaagctttggcagttccaggctctcctcttaccataacttttactctatccgtggtgctgaagtcagctttggttgtggtgtcttggccagtggtaaggccctggttttcaacaaagatgggcggcgtcagctaattacatctttccttgacagctcacaatccaggtttctccagttcacactgagactggggagcaaatctgttctgagcacgtgcagagcccctgatcagcctggtgaaggagttttgttgcattattcttatgataatgggataacttggaaactcctggagcattattcatatctcagctatcatgagcccagaataatctccgtagaactaccaggtgatgcaaagcagtttggaattcagttcagatggtggcaaccgtatcattcttcccagagagaagatgtatgggctattgatgagattatcatgacatctgtgcttttcaacagcattagtcttgactttaccaatcttgtggaggtcactcagtctctgggattctaccttggaaatgttcagccatactgtggccacgactggaccctttgttttacaggagattctaaacttgcctcaagtatgcgctatgtggaaacacaatcaatgcagataggagcatcctatatgattcagttcagtttggtgatgggatgtggccagaaatacaccccacacatggacaaccaggtgaagctggagtactcaaccaaccacggccttacctggcacctcgtccaagaagaatgccttccaagtatgccaagttgtcaggaatttacatcagcaagtatttaccatgccagtgagtttacacagtggaggagagtcatagtgcttcttccccagaaaacttggtccagtgctacccgtttccgctggagccagagctattacacagctcaagacgagtgggctttggacagcatttacattgggcagcagtgccccaacatgtgcagtgggcatggctcatgcgatcatggcatatgcaggtgtgaccaggggtaccaaggcactgaatgccacccagaagctgcccttccgtccacaattatgtcagattttgagaaccagaatggctgggagtctgactggcaagaagttattgggggagaaattgtaaaaccagaacaagggtgtggtgtcatctcttctggatcatctctgtacttcagcaaggctgggaaaagacagctggtgagttgggacctggatacttcttgggtggactttgtccagttctacatccagataggcggagagagtgcttcatgcaacaagcctgacagcagagaggagggcgtcctccttcagtacagcaacaatgggggcatccagtggcacctgctagcagagatgtacttttcagacttcagcaaacccagatttgtctatctggagcttccagctgctgccaagaccccttgcaccaggttccgctggtggcagcccgtgttctcaggggaggactatgaccagtgggcagtcgatgacatcatcattctgtccgagaagcagaagcagatcatcccagttatcaatccaactttacctcagaacttttatgagaagccagcttttgattaccctatgaatcagatgagtgtgtggttgatgttggctaatgaaggaatggttaaaaatgaaaccttctgtgctgccacaccatcagcaatgatatttggaaaatcagatggagatcgatttgcagtaactcgagatttgaccctgaaacctggatatgtgctacagttcaagctaaacataggttgtgccaatcaattcagcagtactgctccagttcttcttcagtactctcatgatgctggtatgtcctggtttctggtgaaagaaggctgttacccggcttctgcaggcaaaggatgcgaaggaaactccagagaactaagtgagcccaccatgtatcacacaggggactttgaagaatggacaagaatcaccattgttattccaaggtctcttgcatccagcaagaccagattccgatggatccaggagagcagctcacagaaaaacgtgcctccatttggtttagatggagtgtacatatccgagccttgtcccagttactgcagtggccatggggactgcatttcaggagtgtgtttctgtgacctgggatatactgctgcacaaggaacctgtgtgtcaaatgtccccaatcacaatgagatgttcgataggtttgaggggaagctcagccctctgtggtacaagataacaggtgcccaggttggaactggctgtggaacacttaacgatggcaaatctctctacttcaatggccctgggaaaagggaagcccggacggtccctctggacaccaggaatatcagacttgttcaattttatatacaaattggaagcaaaacttcaggcattacctgcatcaaaccaagaactagaaatgaagggcttattgttcagtattcaaatgacaatgggatactctggcatttgcttcgagagttggacttcatgtccttcctggaaccacagatcatttccattgacctgccacaggacgcgaagacacctgcaacggcatttcgatggtggcaaccgcaacatgggaagcattcagcccagtgggctttggatgatgttcttataggaatgaatgacagctctcaaactggatttcaagacaaatttgatggctctatagatttgcaagccaactggtatcgaatccaaggaggtcaagttgatattgactgtctctctatggatactgctctgatattcactgaaaacataggaaaacctcgttatgctgagacctgggattttcatgtgtcagcatctacctttttgcagtttgaaatgagcatgggctgtagcaagcccttcagcaactcccacagtgtacagctccagtattctctgaacaatggcaaggactggcatcttgtcaccgaagagtgtgttcctccaaccattggctgtctgcattacacggaaagttcaatttacacctcggaaagattccagaattggaagcggatcactgtctaccttccactctccaccatttctcccaggacccggttcagatggattcaggccaactacactgtgggggctgattcctgggcgattgataatgttgtactggcctcagggtgcccttggatgtgctcaggacgagggatttgtgatgctggacgctgtgtgtgtgaccggggctttggtggaccctattgtgttcctgttgttcctctgccctcgattcttaaagacgatttcaatgggaatttacatcctgacctttggcctgaagtgtatggtgcagagagggggaatctgaatggtgaaaccatcaaatctggaacatctctaatttttaaaggggaaggactaaggatgcttatttcaagagatctagattgtacaaatacaatgtatgtccagttttcacttagatttatagcaaaaagtaccccagagagatctcactctattctgttacaattctccatcagtggaggaatcacttggcacctgatggatgaattttactttcctcaaacaacgaatatacttttcatcaatgttcccttgccatacactgcccaaaccaatgctacaagattcagactctggcaaccttataataacggtaagaaagaagaaatctggattgttgatgacttcattatcgatggaaataatgtaaacaaccctgtgatgctcttggatacatttgattttgggcccagagaagacaattggtttttctatcctggtggtaacatcggtctttattgtccatattcttcaaagggggcacctgaagaagattcagctatggtgtttgtttcaaatgaagttggtgagcattccattaccacccgtgacctaaatgtgaatgagaacaccatcatacaatttgagatcaacgttggctgttcgactgatagctcatccgcggatccagtgagactggaattttcaagggacttcggggcgacctggcaccttctgctgcccctctgctaccacagcagcagccacgtcagctctttatgctccaccgagcaccaccccagcagcacctactacgcaggaaccatgcagggctggaggagggaggtcgtgcactttgggaagctgcacctttgtggatctgtccgtttcagatggtaccagggattttaccctgccggctctcagccagtgacatgggccattgataatgtctacatcggtccccagtgtgaggagatgtgtaatggacaggggagctgtatcaatggaaccaaatgtatatgtgaccctggctactcaggtccaacctgtaaaataagcaccaaaaatcctgattttctcaaagatgatttcgaaggtcagctagaatctgatagattcttattaatgagtggtgggaaaccatctcgaaagtgtggaatcctttctagtggaaacaacctctttttcaatgaagatggcttgcgcatgttgatgacacgagacctggatttatcacatgctagatttgtgcagttcttcatgagactgggatgtggtaaaggcgttcctgaccccaggagtcaacccgtgctcctacagtattctctcaacggtggcctctcgtggagtcttcttcaggagttccttttcagcaattccagcaatgtgggcaggtacattgccctggagatacccttgaaagcccgttctggttctactcgccttcgctggtggcaaccgtctgagaatgggcacttctacagcccctgggttatcgatcagattcttattggaggaaatatttctggtaatacggtcttggaagatgatttcacaacccttgatagtaggaaatggctgcttcacccaggaggcaccaagatgcccgtgtgtggctctactggtgatgccctggtcttcattgaaaaggccagcacccgttacgtggtcagcacagacgttgccgtgaatgaggattccttcctacagatagacttcgctgcctcctgctcagtcacagactcttgttatgcgattgaattggaatactcagtagatcttggattgtcatggcacccattggtaagggactgtctgcctaccaatgtggaatgcagtcgctatcatctgcaacggatcctggtgtcagacactttcaacaagtggactagaatcactctgcctctccctccttataccaggtcccaagccactcgtttccgttggcatcaaccagctccttttgacaagcagcagacatgggcaatagataatgtctatatcggggatggctgcatagacatgtgcagtggccatgggagatgcatccagggaaactgcgtctgtgatgaacagtggggtggcctgtactgtgatgaccccgagacctctcttccaacccaactcaaagacaacttcaatcgagctccatccagtcagaactggctgactgtgaacggagggaaattgagtacagtgtgtggagccgtggcgtcgggaatggctctccatttcagtgggggttgtagtcgattattagtcactgtggatctaaacctcactaatgctgagttcatccaattttacttcatgtatgggtgcctgattacaccaaacaaccgtaaccaaggtgttctcttggaatattctgtcaatggaggcattacctggaacctgctcatggagattttctatgaccagtacagtaagcccggatttgtgaatatccttctccctcctgatgctaaagagattgccactcgcttccgctggtggcagccaagacatgacggcctggatcagaacgactgggccattgacaatgtcctcatctcaggctctgctgaccaaaggaccgttatgctggacaccttcagcagcgccccagtaccccagcatgagcgctcccctgcagatgccggccctgtcgggaggatcgcctttgacatgtttatggaagacaaaacttcagtgaatgagcactggctattccatgatgattgtacagtagaaagattctgtgactcccctgatggtgtgatgctctgtggcagtcatgatggacgggaggtgtatgcagtgacccatgacctgactcccactgaaggctggattatgcaattcaagatctcagttggatgtaaggtgtctgaaaaaattgcccagaatcaaattcatgtgcagtattctactgacttcggtgtgagttggaattatctggtccctcagtgcttgcctgctgacccaaaatgctctggaagtgtttctcagccatctgtattctttccaactaaagggtggaaaaggatcacctacccacttcctgaaagcttagtgggaaatccggtaaggtttaggttctatcagaagtactcagacatgcagtgggcaatcgataatttctacctgggccctggatgcttggacaactgcaggggccatggagattgcttaagggaacagtgcatctgtgatccgggatactcagggccaaactgctacttgacccacactctgaagactttcctgaaggaacgctttgacagtgaagaaatcaaacctgacttatggatgtccttagaaggtggaagtacttgcactgagtgtggaattcttgccgaggacactgcactctattttgggggatccactgtgagacaagcggttacacaagatttggatcttcgaggtgcaaagttcctgcaatactgggggcgcatcggtagtgagaacaacatgacctcttgccatcgtcccatctgccggaaggaaggcgtgctgttggactactctaccgatggaggaattacctggactttgctccatgagatggattaccagaaatacatttctgttagacacgactacatacttcttcctgaagatgccctcaccaacacaactcgacttcgctggtggcagccttttgtgatcagcaatggaattgtggtctctggggtggagcgtgctcagtgggcactggacaacattttgattggtggagcagaaatcaatcccagccaattggtggacacttttgatgatgaaggcacttcccatgaagaaaactggagtttttaccctaatgctgtaaggacagcaggattttgtggcaatccatcctttcacctctattggccaaataaaaagaaggacaagactcacaatgctctctcctcccgagaactcattatacagccaggatacatgatgcagtttaaaattgtggtgggttgtgaagccacttcttgtggtgaccttcattccgtaatgctggaatacactaaggatgcaagatcggattcctggcagctcgtacagacccagtgccttccttcctcttctaacagcattggctgctcccctttccagttccatgaagccaccatctacaactctgtcaacagctcaagctggaaaagaatcaccatccagctgcctgaccatgtctcctctagtgcaacacagttccgctggatccagaagggagaagaaactgagaagcaaagctgggcaattgaccacgtgtacattggagaggcttgccccaagctctgcagcgggcacggatactgcacgaccggtgccatctgcatctgcgacgagagcttccaaggtgatgactgctctgttttcagtcacgaccttcccagttatattaaagataattttgagtccgcaagagtcaccgaggcaaactgggagaccattcaaggtggagtcataggaagtggctgtgggcagctggccccctacgcccatggagactcactgtactttaatggctgtcagatcaggcaagcagctaccaagcctctggatctcactcgagcaagcaaaatcatgtttgttttgcaaattgggagcatgtcgcagacggacagctgcaacagtgacctgagtggcccccacgctgtggacaaggcagtgctgctgcaatacagcgtcaacaacgggatcacctggcatgtcatcgcccagcaccagccaaaggacttcacacaagctcagagagtgtcttacaatgtccccctggaggcacggatgaaaggagtcttactgcgctggtggcaaccacgccacaatggaacaggtcatgatcaatgggctttggaccatgtggaggtcgtcctagtaagcactcgcaaacaaaattacatgatgaatttttcacgacaacatgggctcagacatttctacaacagaagacgaaggtcacttaggcgatacccatgaagaatcaaaaagtttattttttttcttccaacatgtgatgtgttgctctccattcttttaaatctcgcactacatctgatatcaggaaatatctgtgaaggacttggtgattacctgaaagcccttctcaagaccgagtgtacaccactttcccacactgtgaactaatgacaagtgacttatttgctcataagtaaatgtcttcatgttgatgtgtccgtgaaagttgtgatctgttgtaatatcagttacagtggcagtattgacaataagaaacagtttaacagaaaaatgaaatttaagcacaaaaaatttaagagattttatgtttaaaatggcatttagcacagtatttaacattcttggtcacaaagctatttaagtggactgtatttcggctatgtctcatgttttatatgattaaattatcattgtttgtcctttatgtattctcttctacaatacaacacattgaaactgtatttacttgttatgttgtaatattttgctgctgaatttggggctacttatattctgcagaaaattaattgaaatacctattcaagaagatagttgtaaagatattgtatctcctttaatatactccttaaaaatgtatgttggtttagcgttgttttgtggataagaaaaatgcttgaccctgaaatattttctactttaaattgtggatgaagaccctatctcccacaaataagttcccatttccttgtctaaagatctttttttaagtgttctgtggctgatttactaacagtaactgccattttttgtctgtgataacagagtgatttgtaaaacagtggttgttttttcattgtgttttcttcgtggattgttttttctgcgggtcatattcataccttctgatgaagttgtacaacaccagcaacattataatggccctgtagctctgaatgctatttgtgtaactgaaaggttgcactctagggtgaaccaagctataaaagcccatgcttaaataaaaattatgtccaaaagccattgaa

SEQ ID NO: 238 - DNA, 5259 bp, Homo sapiens
gcctagtgcgcgcgcagtaacctgtttgtggcctggtcggcgtcccgtagggcgccctcccgcgctaggccggccggcgtggcgctcggcgccgaacaggccccgaggaggccgcagttaggcctagtgattatccagttgccctgagcggctgcggaggtgcgctccataagcgggcagggtgggaaaagttcgcccgtttgtccggaaggcagttgatggacctggggtcgacaccactgcggacgcagggcacggcacgggggcgagaaggcgaaggctgcaggcgtgaggagctgtgactaatgagaattaaaggccatggatgaagatgaatttgaattgcagccacaagagccaaactcattttttgatggaataggagctgatgctacacacatggatggtgatcagattgttgtggaaatacaagaagcagtttttgtttctaatattgtggattctgacataactgtgcataactttgttcctgatgacccagactcagttgtaatccaagatgttgttgaagatgttgtcatagaggaggatgttcagtgctcagatatcttagaagaggcagatgtatctgaaaatgtcatcattcctgagcaagtgctggactcagatgtaactgaagaagtttctttaccacactgcacagtcccagatgatgttttagcttctgacattacttcaacctcaatgtctatgccagaacatgttttaacgagtgaatccatgcatgtgtgtgacattggacatgttgaacatatggtgcatgatagtgtagtggaagcagaaatcattactgatcctctgacgagtgacatagtttcagaagaagtattggtagcagactgtgcccctgaagcagtcatagatgccagcgggatctcagtggaccagcaagataatgacaaagccagctgtgaggactacctaatgatttcgttggatgatgctggcaaaatagaacatgatggttccactggagtgaccatcgatgcagaatcagaaatggatccttgtaaagtggatagcacttgtcctgaagtcatcaaggtgtacatttttaaagctgaccctggagaagatgacttaggtggaactgtagacattgtggagagtgaacctgaaaatgatcatggagttgaactacttgatcagaacagcagtattcgtgttcccagggaaaagatggtttatatgactgtcaatgactctcaacaagaagatgaagatttaaatgttgctgaaattgctgatgaagtttatatggaagtgatcgtaggagaggaggatgctgctgttgcagcagcagcagctgctgtgcatgagcagcaaattgatgaggatgaaatgaaaaccttcgtaccaattgcatgggcagcagcttatggtaataattctgatggaattgaaaaccggaatggcactgcaagtgccctcttgcacatagatgagtctgctggccttggcagactggctaaacagaaaccaaagaaaaagagaagacctgattccaggcagtaccaaacagcaataattattggccctgatggtcatcctttgactgtctatccttgcatgatttgtgggaagaagtttaagtcgaggggttttttgaaaagacacatgaaaaaccatcctgaacaccttgccaagaagaagtaccactgtactgactgtgattacactaccaataagaagataagtttacataaccacctggagagccacaagctgaccagcaaggcagagaaggccattgaatgtgatgagtgtgggaagcatttttctcatgcaggggctttgtttactcacaaaatggtgcataaggaaaaaggggccaacaaaatgcacaagtgtaaattctgtgaatatgagacagctgaacaggggttattgaatcgccacctcttggcagtccacagcaagaactttcctcatatttgtgtggagtgtggtaaaggtttccgacacccgtcggaactgagaaagcacatgcgaatccataccggcgagaagccataccaatgccagtactgtgaatataggtctgcagactcttctaacttgaaaacacatataaaaacaaagcatagtaaagagatgccattcaagtgtgacatttgtcttctgactttctcagataccaaagaagtgcagcaacatactcttgtccaccaagaaagcaaaacacatcagtgtttgcattgcgaccacaagagttcaaactcaagtgatttgaaacgacatgtaatttcagttcatacgaaagactatcctcataagtgtgagatgtgcgagaaaggctttcacaggccttcagaacttaagaaacatgtggctgtccacaaaggtaaaaaaatgcaccaatgtagacattgtgactttaagattgcagacccatttgttctaagtcgccatattctctcagttcacacaaaggatcttccatttaggtgtaagagatgtagaaagggatttaggcaacaaaatgagcttaaaaagcatatgaagacacacagtggcaggaaagtatatcagtgtgagtactgtgagtatagcactacagatgcctcaggctttaaacggcacgttatttccattcatacaaaagactatcctcatcggtgtgagtactgcaagaaaggcttccgaagaccttcagaaaagaaccagcacataatgagacaccataaagaagttggtctgccctaacagtgtgtctacaagcttgtaaagatgttggccttgaagcagaaaattcattttttaaagccagtcttgttcacatccattactatacattgaattatgctgtgtaaaaatagaattattgcttctagtccacttttctttacattttattcaatacgctgtcctgaatcctattcagtttctttaatagatgaggaaaaatagcaacaagcaagttgcttataataaaataatttgtgattctatactgaattttcagtcataaaagctttactatttatttacatatttattcatgttcatggtactcttctaagacaaaatcagattgataactatgaaagtaacatttttgacccatttcctcctacacaagtgtttcacattggagacatctgctaatataaatgggaggttttactgtcaagtccaattagcaaaacgtggtaataatttttttgtcagtattttcagattacatgataaaattttacatttgagcttctagcattgattaatataggatattgaccacgtttatgtttaaatttcattttgttcagcagacaaaatgtacttcccttaactttcattaatagtgtttacatcttttgtcagcacagcaaacttttagaaagtaatagttttacttatttttatcttctgttttctctttgtactgctttgtcttgcattgtgttccaacacatgagacttactgctcactgaattttggagtcttttagaggtaaattgtggactcaggattttttgaaacttggtgtgtaactctaaatcttgtatatgcatctttgttgcttattacatatttacacacacaaccacaaattttaaacttatgatgaaaatttacaataacctgaaagatccagagatgtatgagagcattttgtaacttgttattcagttactaaatttgaggtgaataattaaaaagaaaaggacattaggagagtgaaaatcttctcttcaaataatctttgatagataaaaatggaaggtaagatgtttctagatagaatgttttcatacaatttcagcttcatatcataaatttttctggaaagctatttcagacatagatttcatagtatttttctgagaatcctgtgaaggaacgctgtctctttgcaaagtaaggaggactaagggaaaatgatggtaccatgtaacagaatgagagctaattccaaattagcaacttcatcctgctttctattttacattgagtaaagttttaaaaagacaacagtcaagttgattttgattagaagataaaagtacataatgaaaatccatggccttatttggaatatatatcactttccaaattttattatttatttgagagttaataagttaatgttattaagcagttaataatttatatgtatggatataatataaaatgaattcatataattaaaaagaatttggttaataagaatttggagaatggaaaatacatttttaggttccttaatttggctgttggtacctgtgtatttggaatattttaggggattcgaattttttttaacccacattacagctaccttctagctttagtatggtagtgcttcattcaacttttgctgtcaggtttttattttcacctttttctgtgccaccaattcaaaagttataggattaggaaatataaatttatatttggtgattggcagcctctgaaatgttagattaatttgatctagttctaaagtgctttagtcatatatgaatttaaacctagtaccatccaaaaccatgtaatggattttaagaatctgttaggccttcttagcctttatacatgtccctacctgatttttactgtccttcatgatcctgttcttgaaaacttcagtttgtatttgagaatcctttaaatctccttccaatttgttttctccctgaagtaatataaaaggaagtatttaagtgaaagtttaagagttttaaaacattctttaaaattaatacagatagttagctatttatcttttaaaaataaactaaggtaaaaaacgtgacactttacatatttcatatttttcatatagtctggaggtatacacagttgttttgtttttaaccacggtattgaaacctttaaaaggtaattaagcatttggtcaagtaaatatagaacatttgtataaagaaagaaatgaaattgtgcttaatgttatatactgttattatttgcaggctggttttaattcttaatttgattagcaaagctaaaaaagtggatgttgaagttgaaagttttaaagaggtacaaaatcttacaaggacataaattattatttggttgaaaaatagcctattagatattgtatgtcccttcctctgtacaaattgtaaaatacttaaaataactatgaagaattcatataggaagtgtgatactattgtaaatgtgtatttgagaatatgcaaaaataaaaataatattttactgttaataaatgtttacttgtatatgaaaaaaaaaaaaaaaaaaaa

SEQ ID NO: 239 - DNA, 11194 bp, Homo sapiens
acgccccctcccctcctcccgttcgctgccagcggtcggtggcggccgctacggtgctgacaagatggcggctggcggagctgtcgctgcggcgcccgagtgccggcttctcccctacgcgctacacaagtggagctccttttcctccacctaccttcccgagaacattttagtggacaaaccaaatgaccaatcttcaagatggtcttcagagagcaactatcctccccagtacttgattctaaagctcgaaaggcctgctatagttcagaatatcacatttggaaaatatgagaaaactcatgtttgcaatttgaagaaatttaaagtctttggtggaatgaatgaagaaaatatgacagagctgttgtccagtggcttaaagaatgattataacaaagaaacattcaccttgaagcataaaattgatgaacagatgttcccttgtcgattcattaaaatagttccactcttgtcctggggacccagctttaactttagcatctggtatgttgaacttagtggcattgatgatcctgatatagtacaaccttgtctcaactggtatagcaagtaccgtgaacaggaagctattcgcctttgcctaaaacacttcagacaacacaactatacagaagcttttgagtcactgcaaaagaaaaccaagattgcactggaacatcccatgttaacagatattcatgacaagctggtgttgaagggtgattttgatgcttgcgaagagttgattgaaaaggctgtaaatgatggcttgttcaatcagtatatcagtcaacaggaatataagccacgatggagtcaaatcattcccaaaagtaccaaaggtgatggggaagataaccgtccaggaatgagaggaggccatcagatggttattgatgttcaaacagagactgtttatttgtttggtggctgggatggaacacaagatcttgctgacttctgggcgtacagtgtgaaggagaaccagtggacatgtatctctagagacactgaaaaagagaatggtcctagtgccagatcgtgtcataaaatgtgcattgatattcaacggaggcaaatctacacattggggcgttacttggattcctctgtgaggaacagcaaatctctgaaaagtgacttctatcgttatgacattgatacaaacacatggatgttactaagtgaggatactgctgctgatggagggccgaaattggtgtttgatcatcagatgtgtatggactcagaaaaacatatgatctacacttttggtggtagaattttgacttgtaatggcagcgtagatgacagcagagccagtgaaccacaattcagtggcttgtttgctttcaactgtcaatgtcaaacctggaaacttcttcgagaggactcctgtaatgctgggcctgaggacatccagtctcgaataggacactgcatgttattccactcaaaaaatcgttgcttatatgtatttggtggccagcgatcaaagacctatttgaatgatttctttagttatgatgtggactctgatcatgtagacataatatcagatggcaccaagaaagactctgggatggttccaatgacaggatttacacagagagcaactattgatccagaactgaatgaaatacacgtcttatctggactcagcaaagataaggaaaagagggaagaaaatgttagaaattcattctggatttatgacattgtgaggaatagttggtcttgtgtctataagaatgatcaagctgcaaaggataatccaactaaaagtcttcaggaagaagaaccatgtccaaggtttgcccatcagcttgtatacgatgagctacacaaggttcattacttatttggtgggaatccaggaaaatcttgctctccaaagatgagattagatgacttctggtcactgaagttgtgtagaccttcaaaagattatttactgaggcattgcaagtacctcataagaaaacacaggtttgaagaaaaggcccaagtggatccccttagtgctctgaaatatttacaaaatgatctttatataactgtggatcattcagacccagaagagacaaaagagtttcagctcctggcatcagctctattcaaatctggttcagattttacagctctgggcttttctgatgtggatcacacctatgctcaaagaactcagctctttgacaccttagtaaatttctttcctgacagcatgactcctcctaaaggcaacctggtagacctcatcacactgtaactgaagagtcactggacacagaaatggaaaacaggagtcgattttccgtcttttggattgcagctccactgactgacagtaaagctgcagtgattgaggactgcaccagagttctgaagggatcttaaccatcacaagtttttaccctcttccttcatgcctgacctcaaccccgctctcctcatcctattcctaaattaggctaataaagtgaaattggtatactttccagttaaatatatatatatatatattttttcttactttatcttttaagaattaatgagtataaaagaaaaattaggcagtttacccttttcagatttttatttcttttttttttaattgggggaaataagcactattaacagattcagcactacaagtattttgaatgttgttgctgttggtcatttggcctgccttttcccttcctatttcactttgcctcccatcacacaactgcgtgtaaatggtgtcacttgttcacctctttacttcattcttaacaagtgtatagttctctaggacagttgatgtatgttaaggtgatatctgtgtctgtattgacttgtcttgtgttacattaaacagtaggcagaactgaggtctcaagtttgcactcttggccatagaactaaaaatgaaacctgagattgacccaagcacctatctgagattggtatataatatttctataatgatatattttatagtagatattacaatagcatctgactttgagtcacagaaaccttaaactgaggagacaatagttcagaacctttttaagagccattctaaaagtgaccagcaggagggatctagtagtgaataatatcttaatagcaattttaggagaaaatgactctttcgtccagaagagctctgcagaaccagggctcccgtttatcttgtgctatctctgtagtattttcatttgagagaggaggctgagtttccagagctttgctttcatttatttttatacacattgtctctctatatctgcttgtggatattgttattttgaagagaaatggtttgtggttgtccagtggtatacaactgacaggcatttcattaagcacatagaccagactttgtgaatggttcagatattttttcattaaaaaacaaggtatggcagatggacttttccatgggtcaaattttttgtgtgagagatagaggtacatgtcttctgatgatgtgctgtggaatgcaatgtgggaaacctacatctggctagtgcttacatttgctcaaaaagcatgttgtatgaagctgactgccaccatgctaaagcagattcatattaagaagtgtcggtcgatccagtggctcttaagagtgaatagctttatggaatcaagtatgtccctgagtagcaagattaggcctcaccaaagaagaaattaacctgcactttcaaaaagtaccatgtataggaatgaaacattgaggtcccactttattctgtctttagtacatggttttacttattttggggatggatagaaatatatttttgctagttctaggcttgaatcatgggctccttggctttcctagcatcccaaagcagtcaacagtgatttcttaagcaatttgatctgtacctttacttgtgaaaggtatgctatataattcagcaagtaccaacttgtgtagctgcagaataaccaagtggctatccagtcaagtaaatacagtttgcttacatacttcaacagtttcataaaacgattcccctgagtgacacaagaacataaaatgttaatatcactaatatagcctgttaaatcttttgtggagacaggtgcaaatcagaagattgacaaggaagaacttgagcttgctaaataagacttcctaaatttaaaagctctagttttgcttagtgtgaattctggcactttaaaaagattaagcaagtgaaattctgctgccctccaccatttatttttacagtgctttgtaatttttttcatcagttccttaaatgttatttggaggaaactaagttcttgacctcagtaattttatttttgtttttccctaaatgtttccctactagtctttttggaaaacatgtttgttttaatttcatcttccctcactttatttaggtagaatttttcccccttcatttctgaaattttttgctcaccgccatgtttaaatggggttgaatcatagcgagccatttgctcttgccaaagtgagatagatgtactgaggagataattgaaaagtcagactctgtactgtggggctttaatcggagcactgctggaaatgattgcagagaatgtagtgcttcatatatccatgaccaagattgacatgttgctcacaacatgtcacaatttagtgaggagctacatgtatttccaagaattccagcatagattataatttaaataatcgaatttggtatttaggtacattgtttatatagccaagtgtatatgctttactacctaacaattattctagcctaggtgaatccctaattgaaacacctggctaacactttagacacataaattaagtgggatacagttttctcatttgtattatctccagcttcaacctcatttatcctttttcctagtataatacattgttttcaaccagaaattaaagtagatatccaacattattttcagtgcttgtacttcatgagaaataatctgattttcaagacacctcttaagtgcatttgcattttattttggtaatggcagagacctcatgtggccagtttgattgattgaagaatgtatcactcttattcaagcaaaggaattcagacttaaatgcctacctctgtgctgaagctgacagacagtattaactcttatcaaggccatcttttagacctgattttcatttatatgaaaacagacctgtccatgtctaataagtaaaaactgatagaatacattaaaaagtcactggtttatcatagaaaagtttgatgggtttagagctcagtgatttaagcttgtaaaactgcattcttgggcaaaatatttatattgtatataaatggttggcagcttattccagttgatctcttcacatctgccttaaaagtgctatgtagagatacattaacagagttataataaaacagtgttttaaaatctagcctataaacaaaaactagtttgaggcacccaagcatttagtgagagattgagaatgatgcttaatggatcaaaaaagcaattaggagtatgttcctgattttattctctaaattatactcaatttcatggtaattacatgaagaagttacctgcaattattcttaacactacatggaattcactgggtaattgtgggtcatttatttcctgaaagtcacgtgaaatccttagctggttgaatgttgcacagtatttgagaattacggtttgaagtgatttctgtgggagggaatcattgcaatgtatattctaaataaagtcatctaactattaaaaaaaaaacacccttcctaacccttcttttcttaaaattccacattcatccacaatctcatccctttgtagaaattcttgcctgaattctcaccaagttttgaattcctaaggtagccccgatctaggatgtgaaggctgcccagaaaaagtttatggctggaggagtatcatacagtgtctacatatgatagtacttacagattaggtctttggatgctttaacacaaaagatttttgttatccttattagtcaaataacgctattcttttgtggttctagaccctggcttctatctccctgtgatttgttttaatgctgaaatgacttggctatccaaagcttctagtctagaggtctgttggttgaaggcagacatttccaagtttgttgaaataatacgaagctgactagcttacgtgaatgatgttgccctcatttgttttgggtgaggactcattactgcagtatattgatctcttcaccaaatgctttttctttttctgaataaatgctgtattagaggttctatttatatatgatttttaaaactttggtttccttctatccaccaaatactgtgaattgtttttccatttatttttcttagctaatgtaactttattcttcacttttttttagccctagacttcctagattttctgtggcattctgtaggacattgtattgcttggaaaaaaaaagatcaaaatcattctggggcaaatgctctattatccttatttatgacaagagaataatgaaattcataagaaattaataacattcagatattgctataaatgtacttgagtcattttcatttggggatagtaataatggctgtggcagctttaatggagaaacctgtgttggcctctttttctggcattaggatctcttgtcatagaactattggtaaagtacaggtttgatagcagagttcctgaattcagcatatcatcagaatttccatttaccttttgtcttttctttttattgtattttttaacctttttgtttctattcctacctcccatgagtaacattgatttctgctgaagttagaatttgtgttaagaattgactttaaacttctgaaatagttgaatattagaagtggcttcagttgccatgaaatgattgcttttctttttctttttttttccttaaataaaaataatgcagccttatatatgtctcttcccctcaagaatgtgaatttaggctgggcatagtgactcacgcctgtaatcccagacctttgggaggctgacacgggaagattgcttgagcccaggaatttcagaccagcctgggcaacacaggaagactccatctctacttaaaatatttttgttttttagccaggtgtggtggtatgtgcctgtagtcccagctacttgggaggctgaggtgggaggatcacttgaacccaggagtttggggtgcagtgagctatgattgcgacactgcactccagcctgggcaacagagcaagaccctgtctcaaaaaaaaaaaaaaaaaaagaatgtgaatttagctccaattccaaatgactaactcttaggccagtcatagccaatgaaatcatctgacggtagcttctgtagcccttaacctaaggagtcattagaggttatagtaaattagtttctctagtggtgcagagagaaatgccatcggggaaattatcactgtctttttggctaaagttttatattgtgaactggatcccacttaacagcttaaaaacacaaaaatgaaagggtagtcctagtttatcttcttaattagaatcattatttggaaataagatttgcaatgtgctgtctatccccaaacactgctgagcttgctggaaaacagaatttaacatgaatgttgtctgaaagctgtaggatcaatggcaaaaaaggggaaatgtttggtagggaattggaccagttctaaggtatcacttttaattataaaataatgtcttcctttttatctgcttttcagacagcctcagtgaactattaaacatttgtgtgcaaagtcctattttgcttatctaaggcattttgacttggaagtattaaacttcaggaacgagctagagaagacaatgagggtatgttagagaaggaaaaataggagctttttgcttatggattttagaggtccacaaatcgaaaggaaaaataaatttcttcatttctaaccctaaaataattttgttaatgagatgctgggaagaagactaccaaaaggcctcaaagctcatgcttctagaatattcagtaattctgaatagtctttgggaagtagcatttcttgggaagtagcatttcccttcttccaaataactgtttgagatcttaaaacagaaaatccagtgttaatgggctctagatcttaaactaggtgagcagcttcttacatacaaccagttccttgttaaggatccagcaggaaaaccagccataaaacatttcaacatgcagtttgggggctcccttgcttattcactgagtttaagctcttgctgcaacatagctctgtaccatctgggatgctagcagtcacagcagttagctcagatatctgagctgtctgccacacaaagcctgaggagatcatcattcttcagtttcattcattacttaatgaatgccaaattaattggcaggaagaagaaacactgtgtgatatactgaacaagcctgtgtgcatgaataaggagccactcaaaaagccaattttgagctttatttctccgttgttaacaaatctcaagaaagcctttgttacagtttagctcatgtcatttggttggttttattttctagccctttaacataggaggaaaattgtcatttcatgtataacttgtaacacagaattgaactgatactagtttccttgccttaaattaattatatgtcatcccaagggtctctgttaattctgctttgccaagcaataatgagatctgggtttggcattagaagtatttcataattttggttttttatttaggtttcctccacatctgtaaagtgattgattaaattagaggaggcgtgtagaataaatcccaatcccattgcaactggcagagctttataaatctttataaattcagttacaacaaaggagaggatcctacaccattagagccatgccatcaggtgtttgcaagtgacagctgtagtgtgttgcctcaaataataccaagttataaataataccaagtaattatcaactcactcccaaatttaataagatatcaaagtccaaaaggttacttaggagtagtcttccgtgggggaagataaatttattaaagagtcatgtactgatctttttcttgggattttttttcctttcccagaaaaaaaaattattttggtgactgatcaattgtaaacaattttcttccttacttacaaatcatccgttcagaaaaataaaagtggacttcctttcctaagcattacaattagcctgggcaagaggtgttatgattgtcttattctttaagccggcttactttttggatttgtgtgaaatgtcttttgaaaagaaagtagatagtatagtattaattaactactttgtatagtcttctgcataatttagagttgaaaataatgtaacattttcctgtgaacagattcctttatgcgtacatactttataaatatacatacatacacatacacatacatttttaaaatgctctttttaaagagattcttatcttgctcccactccaaaagctatgtacagttgagttattagcctcagaggaagagtacaggaaagcgaagatgaggacctccttttcttgtgttggtcttgggaacaaacagtattccgtctttcaaatatggcatatttctaaacagtttgggaaagatgttagaattttttaaaagtcagctcttttataaattggaagtactcagtagtcagaaattaagatcccctctgatagagatagattctcaaaaccaaaattggactgaaaattagattgagaagaaagatacaacttcctccatagccaataaaatctgtctttccaagtctgcttattaatgctgtgaatcgctccttctgtttgtgaaaacatctcctggactggaaatgtggtgctgtaaccagctgagccgaaagttggagaatgttaaatatcttatatgggacttacgataaaatgtattgatgttagtgattgtcaaaataggtttatcatttaaaaaactaggaaattactaagtataaagaagaaaaaccagtattaattaagtgatgagacctgttcattttgttttccctgacttatttccattaccaaacatagtaaaggccagaaaagattaaaaaaaaaattaacacagccattccattgttttttaccacatggagaaaggaccaggctggaagcatatgtccccccacccttatttatattcctttgagcattgccgttttctagacagacaatccgaaaataattgtgttgataggtctgtttaagcctgaactctgggtgtaaaatgttatccagaagctatagggagctgccttgctcaggtcattggaaatttcaaccctaagactcattggaatttctaagtccgttatgcaccattatgggcatatggagcatattcataccatgaggaggagtctttgtttatgatggactttttaatatggccataattaaactcacactcaaaaaggatgagctattgtcaaaagccaaaagaaaaacagacaaaatgaacatgaagcaaggagtccataaaacaagagttctttaccacgtttaagcaaatgtctctcaaaaaaaattgtatttctgtgcacattagctgagattcacacattttgcacctcagtagtatttcagatgagactcaatgtgtggagaaaaccgctaacttgtttggttctactcttaccccctcttctgtggcaatgtggggtcagggccgtatcctaaagtatccacatggtcttaaatggaaatcatgggactctggaaagctggcatgagctggttggagcttttaaacagaagtgctttatgggtatcagatctcttctgacatcaattgtttcaaatcattgttgggctctgtcgtgttctgcaatcttccccattcccctcatgatctctggcttatcttttatccaatctgtatggactttttaggattttttttttcttatagtacaaataattttcagatcccagctttggtaaatgtgttaattctactttgtgaataaataaatgagtgatctgctaaaaatggcaattgtagaattatgttgtatgtaatgtacatatggagaaagaatgtattttgttcattttcttaataaaatgttatatatggatgctacaagataaaaaaaaaaaa

SEQ ID NO: 240 - DNA, 4446 bp, Homo sapiens
ggcactaaaggtttgcttccgggcgtttcttttgcttccccttccctctttcacgcttcctcccctccccctcctcccttatcccttcgctttcgctcttttccgtcgaggccgacccctgagttgtgagtctggggtctggttggtgaaaaagagcccttgaagctggaagacgggagaggacaaaagcatgtcttcccttcctgggtgcattggtttggatgcagcaacagctacagtggagtctgaagagattgcagagctgcaacaggcagtggttgaggaactgggtatctctatggaggaacttcggcatttcatcgatgaggaactggagaagatggattgtgtacagcaacgcaagaagcagctagcagagttagagacatgggtaatacagaaagaatctgaggtggctcacgttgaccaactctttgatgatgcatccagggcagtgactaattgtgagtctttggtgaaggacttctactccaagctgggactacaataccgggacagtagctctgaggacgaatcttcccggcctacagaaataattgagattcctgatgaagatgatgatgtcctcagtattgattcaggtgatgctgggagcagaactccaaaagaccagaagctccgtgaagctatggctgccttaagaaagtcagctcaagatgttcagaagttcatggatgctgtcaacaagaagagcagttcccaggatctgcataaaggaaccttgagtcagatgtctggagaactaagcaaagatggtgacctgatagtcagcatgcgaattctgggcaagaagagaactaagacttggcacaaaggcacccttattgccatccagacagttgggccagggaagaaatacaaggtgaaatttgacaacaaaggaaagagtctactgtcggggaaccatattgcctatgattaccaccctcctgctgacaagctgtatgtgggcagtcgggtggtcgccaaatacaaagatgggaatcaggtctggctctatgctggcattgtagctgagacaccaaacgtcaaaaacaagctcaggtttctcattttctttgatgatggctatgcttcctatgtcacacagtcggaactgtatcccatttgccggccactgaaaaagacttgggaggacatagaagacatctcctgccgtgacttcatagaggagtatgtcactgcctaccccaaccgccccatggtactgctcaagagtggccagcttatcaagactgagtgggaaggcacgtggtggaagtcccgagttgaggaggtggatggcagcctagtcaggatcctcttcctggatgacaaaagatgtgagtggatctatcgaggctctacacggctggagcccatgttcagcatgaaaacatcctcagcctctgcactggagaagaagcaaggacagctcaggacacgtccaaatatgggtgctgtgaggagcaaaggccctgttgtccagtacacacaggatctgaccggtactggaacccagttcaagccagtggaacccccacagcctacagctccacctgccccacctttcccacctgctccacctctatccccccaagcaggtgacagtgacttggaaagccagcttgcccagtcacggaagcaggtagccaaaaagagcacgtcctttcgaccaggatctgtgggctctggtcattcctcccctacatctcctgcactcagtgaaaatgtctctggtgggaaacctgggatcaaccagacatatagatcacctttaggctccacagcctctgccccagcaccctcagcactcccggcccctccagcacccccagtcttccatggcatgctggagcgggccccagcagagccctcctaccgtgctcccatggagaagcttttctacttacctcatgtctgcagctatacctgtctgtctcgagtcagacctatgaggaatgagcagtaccggggcaagaaccctctgctggtcccgttactatatgacttccggcggatgacagcccggcgtcgagttaaccgcaagatgggctttcatgttatctataagacaccttgtggtctctgccttcggacaatgcaggagatagaacgctaccttttcgagactggctgtgacttcctcttcctggagatgttctgtttggatccatatgttcttgtggaccgaaagtttcagccctataagcctttttactatattttggacatcacttatgggaaggaagatgttcccctatcctgtgtcaatgagattgacacaacccctccaccccaggtggcctacagcaaggaacgtatcccgggcaagggtgttttcattaacacaggccctgaatttctggttggctgtgactgcaaggatgggtgtcgggacaagtccaagtgtgcctgccatcaactaactatccaggctacagcctgtaccccaggaggccaaatcaaccctaactctggctaccagtacaagagactagaagagtgtctacccacaggggtatatgagtgtaacaaacgctgcaaatgtgacccaaacatgtgcacaaaccggttggtgcaacatggactacaagttcggctacagctattcaagacacagaacaagggctggggtatccgctgcttggatgacattgccaaaggctcttttgtttgtatttatgcaggcaaaatcctgacagatgactttgcagacaaggagggtctggaaatgggtgatgagtactttgcaaatctggaccatatcgagagcgtggagaacttcaaagaaggatatgagagtgatgccccctgttcctctgacagcagtggtgtagacttgaaggaccaggaagatggcaacagcggtacagaggaccctgaagagtccaatgatgatagctcagatgataacttctgtaaggatgaggacttcagcaccagttcagtgtggcggagctatgctacccggaggcagacccggggccagaaagagaacggactctctgagacaacttccaaggactcccaccccccagatcttggacccccacatattcctgttcctccctcaatccctgtaggtggctgcaatccaccttcctccgaagagacacccaagaacaaggtggcctcatggttgagctgcaatagtgtcagtgaaggtggttttgctgactctgatagccattcatccttcaagactaatgaaggtggggagggccgggctgggggaagccgaatggaggctgagaaggcctccacctcaggactaggcatcaaggatgagggagacatcaaacaggccaagaaagaggacactgacgaccgaaacaagatgtcagtagttactgaaagctctcgaaattacggttacaatccttctcctgtgaagcctgaaggacttcgccgcccacctagtaagactagtatgcatcaaagccgaagactcatggcttctgctcagtccaaccctgatgatgtcctgacactgtccagcagcacagaaagtgagggggaaagtgggaccagccgaaagcccactgctggtcagacttcggctacagcggttgacagtgatgatatccagaccatatcctctggctctgaaggggatgactttgaggacaagaagaacatgactggtccaatgaagcgtcaagtggcagtaaaatcaacccgaggctttgctcttaaatcaacccatgggattgcaattaaatcaaccaacatggcctctgtggacaagggggagagcgcacctgttcgtaagaacacacgccaattctatgatggcgaggagtcttgctacatcattgatgccaagcttgaaggcaacctgggccgctacctcaaccacagttgcagccccaacctgtttgtccagaatgtcttcgtggatacccatgatcttcgcttcccctgggtggccttctttgccagcaaaatccgggctgggacagaacttacttgggactacaactacgaggtgggcagtgtggaaggcaaggagctactctgttgctgtggggccattgaatgcagaggacgtcttctttagaggacagccttcttcccaacccttcttgaactgtcgtttcctcaggaactgggtcttcctgattgttgaaccctgacccgaagtctctgggctagctactccccccagctcctagttgatagaaatgggggttctggaccagatgatcccttccaatgtggtgctagcaggcaggatcccttctccacctccaaaggccctaaagggtggggagagatcaccactctaacctcggcctgacatccctcccatcccatatttgtccaagtgttcctgcttctaacagactttgttcttagaatggagcctgtgtatctactatctccagtttgtattatttcttgaaagtcttttaacaatatgataaaactaagattgtgaaa

SEQ ID NO: 241 - DNA, 2056 bp, Homo sapiens
gagagcgccggccccgcccccgccgttcgcgctctgaccagcccgcagagccagcccccgaccccgggccacctgggcccccgggttccgccggcactctcgccaccaccgcgtgggtctgacaagatgtaccaggtcccactaccactggatcgggatgggaccctggtacggctccgcttcaccatggtggccctggtcacggtctgctgtccacttgtcgccttcctcttctgcatcctctggtccctgctcttccacttcaaggagacaacggccacacactgtggggccacgccctgcaggatgttctctgcggcctcccagcctttggaccccgatgggaccttgttccggcttcgcttcacagccatggtctggtgggccatcacttttcctgtgttcggcttcttcttctgcatcatctggtccctggtgttccactttgagtacacggtggccactgactgtggggtgcccaattacctgccctcggtgagctcagccatcggcggggaggtgccccagcgctacgtgtggcgtttctgcatcggcctgcactcggcgcctcgcttcttggtggccttcgcctactggaaccactacctcagctgcacctccccgtgttcctgctatcgcccgctctgccgcctcaacttcggcctcaatgtcgtggagaacctcgcgttgctagtgctcacttatgtctcctcctccgaggacttcaccatccacgaaaatgctttcattgtgttcattgcctcatccctcgggcacatgctcctcacctgcattctctggcggttgaccaagaagcacacagtaagtcaggaggatcgcaagtcctacagctggaaacagcggctcttcatcatcaacttcatctccttcttctcggcgctggctgtctactttcggcacaacatgtattgtgaggctggagtgtacaccatctttgccatcctggagtacactgttgtcttaaccaacatggcgttccacatgacggcctggtgggacttcgggaacaaggagctgctcataacctctcagcctgaggaaaagcgattctgaacccttcagtcctgcttgggaggacgcagcccactgcccagaaacaagaaacacgataccattctggccttccccaccccacatcctctcttggccttactgaagatgggggaagggtaagaaggaagggtgtaggccaaggctcaccccagtgctgctggcttctcctctccacccctcatatgggcgtggggtcctcaaacatcacctttacctgagaggccccaagaagctgagctggcagagagctccaccatttggtgctaaaaaaaaaaacgtcctgaggttcatgaccaccatccagtttctggcctttacacagtcacctttcactgaggtcaggagcccctgagcagtggctgctccctgacaaccacagccatttctctgcacgggggtcattcataggactaatgtatttcatgatctactgtgcacatccaggcctgtggccacagtcccctgctaaagttgctcaggtgttctagtcctgacttcacctttttgatttggtgtgtgccctagggtatgtacccttccccatctgagcctcggtgtgtccatgtgtctggcgggggatgggtggactgtatgatttccaaggactctaccagtcagtggttctgatgtcatcgggtggaggtggtgttctatacctaaaggatgacctgctccagaaacagcaccagcacagcatgtattttcttctcttctgaaagttctggcttgtagacccctcccctcctttgcaaaggtatgggatagaggggtcagatgcagatctctactgtaaaatgggctccctggtatctcctgtcttccctactgctccaaaccctaaattttggttgtacattttatttgaaaggaaaataaattttttttttgggccaaaaaaaaaaaaaaaaaaaaaaaaaaaaaaaaaaaaaaaaaaaaaaaaaaaaaaaaaaaaaaaaaaaaaaaaaaaaaaaaaaaaaaaaaa

SEQ ID NO: 242 - DNA, 3869 bp, Homo sapiens
gtgaagctgcgctggggccgggctctgagaggaccggcgcagccgcggggagcctttgaggccctccctcggtgttttttcccagggcgtgggcttgccccgcgcgtgtctgtggagggcggaaacagcggaggggccagtctcctggcgaaggggcctaatccttgcccgccatgtccgggggcttcgagctgcagccgcgggacggcggtccccgggtggccctggcgcccggggagacggtgatcggccgcgggccgctgctgggaataacagacaagagagtatccagaagacatgccattcttgaggtggcaggtggtcagctgcgaatcaaaccgatacacacaaatccatgtttttaccagtcttcagagaagagtcagctcttaccattgaagccaaatctatggtgctatttgaatcctggagacagcttttctttgttagttgacaaatacattttccgcattctctctataccctctgaagtggaaatgcaatgtaccttaagaaacagtcaagtgcttgatgaagataatatattgaatgaaacaccaaaatcccccgtgattaatttacctcatgagactactggtgcctcacaactggaaggaagcacagaaatagccaagacccagatgactcccacaaatagtgtgtctttcctaggtgaaaatagagactgcaataagcagcagccaatccttgccgagaggaaaagaatccttccaacttggatgttagcagaacatttaagtgatcaaaacctttcagtaccagcaatcagtggaggtaatgtaatccagggaagtggaaaagaagaaatctgcaaagataaatcccagctaaacacaacccagcaaggaagaaggcaattaatttcatcaggaagttcagaaaatacatcagcagaacaagacacaggagaagagtgcaaaaatactgatcaggaagagtctaccatttcatccaaggaaatgccacaatcattttctgcaatcacattaagtaacacagagatgaataatattaagactaatgcacagagaaacaaacttccaatagaggaacttggtaaagtttctaaacataaaattgccactaaaagaacaccacataaagaagatgaggcaatgagctgttctgaaaattgttcgagtgcccagggcgactcacttcaggatgagtctcaagggtctcattctgagtccagctctaatccctccaatcctgaaactttgcatgcaaaggcaactgattcagttctacaaggttctgaaggaaacaaggtcaagaggacatcctgcatgtatggggcaaactgctataggaagaatcctgttcattttcaacattttagccatcctggtgatagtgattatggaggtgtacaaatcgtgggccaagatgagactgatgaccggcctgaatgtccctatggaccatcctgttataggaagaatccccagcacaagatagaatatagacataatacgcttccagtgagaaatgttttagatgaagataatgataatgttgggcaacccaatgagtatgacctgaacgacagctttctagatgatgaggaagaagactatgagccaacagatgaagattctgactgggaaccaggaaaggaagatgaagagaaggaagatgtggaagagcttttgaaagaagcaaaaaggtttatgaaaagaaaatagtaactaacttctgtagtcatatctgccttacatttactttttctttgtgggaaaacatttatgaactaaggaggtacttaagtgacagttattttccttcttttgatagttaatgacttttactactgactctttacaaatgagacattgaaacgtcagccttcagtataatagatggaattttttgttgccttgccttttctttcctacttaaagcatctggaaataggaagacagagaaggtagagtaaaaatggatattttttatgtactttgtatattggtaataaaaagtaaaagccataggttgcataaaactttggtctttttaaatttttttccaaagattatggagtactctgcaagtataaccaggcaaagtacatgaaaacatgcctcttttcattgttactgaagtaattctgtaagcagaaccaggctttaaaaaatgcagccattacataatggcgttttttttctagtaccttagatgtgagctttgcaatttcacttactacttttatccttcaaaacttgggaagattggttccaaatgggtactgaaaatagattcaactaggctgtagaagagaaatgttcaccatgtagggaatgttattttgtgttccacatctgcaatttactgtatgtttgaatttaaaagtaaaaaaactcaaaaaacttgaccttttttttcaaactaaagtcctagctgattattttaactctcagtgtgctgtctttatattaagaatagagaaacgacataactttctcaaatggcattagttttgccttagtttttttgacctcagatgaaagtagcaagttgtttgccagttgaaagttcaagattctggcctcccatatcaagaagaaaccacttattctccagttttacaaagtatctttctgtatttctgttctaaaactactttaagccctataatgctcttcatattacgtgactttgaattgttaaaatgtagtttagaatctttaataacagttgggttgtgtacacagagcaggagatatttattgaaatcataaatcactaagccaaaagaatctttgttaaatgctattattttctactctaaaggaacctaaaaatttatatcttaaaagatcaaaacatatttataataatattttctcattgctttaaaatatatctcccagtaattatacaatatttaatatttacttaaactggaacaagaataagataaacatttctctagactataacctattattctgatttttatctcttattgttatttgggaactatttttccccttataatgtccctttagccttggtagtataacaaatctacgaatgtaatatttaacttattctcatccctgccactaacttaatccttgaagtgttacataatctactcctaggtatatacccagaggaattgaaaacatttccacataaaaactgtacacaatgtcaatagaagcattattcttaacagccaaaaagtataaacacccaaagtctatcaactatcaactgggtgaatggataagcaaaacgtggtatatctgtgcaatggaatattatttggtcataaaaaggaataaagtactgatacatgctacaagatagatgaaccttgaaggcaagtaaaagaagccagacacaaaaggccacatactgtatgaactcatttatatgaaatttccaaaacaggcaaatccataaagacagaaagcaaatttgtggttgccagggacttggggaggaagaatggggagtgactgctaatgagtataggatttccttttgagtgataaaaatgttctaagattagatggcagtgatggttgcacaactctgtaaatatattacaaacaatgcattgtacactttcaaagggtagatttcattgcacgtgaactatatatttcaataaatctgtcacaaaaaagtaatgcaaagggtaataccagtcttttagaaggaaaaaaatatttaatatcaaaggatattcttcgtagtaatgtaatagttcatggtagctgcttttaacgatacagttttaatgcaactttcataatcatcctgaagacacttttgagtataactattgtataaataaatgtatagcttaattgaaaaaaaaaaaaaaaaaaaaa

SEQ ID NO: 243 - DNA, 1054 bp, Homo sapiens
ccacaagctggccccttggcctcctagagaccctgacatctcctccagcagcatctgtcctctctcctcagggaggcaagcatttgatgctcgaggtccctggcagttgtggtccttggcaagtgatgtgtgagtcccgtgtgtcataggaagctccccatccccatctggtgaccaaaggcctggctacaagtagtgagtccttcctcctccacccagacctcactgctcagatccccttcgccaactgggacatcttccgacatggcctggatgctgttgctcatcttgatcatggtccatccaggatcctgtgctctctgggtgtcccagccccctgagattcgtaccctggaaggatcctctgccttcctgccctgctccttcaatgccagccaagggagactggccattggctccgtcacgtggttccgagatgaggtggttccagggaaggaggtgaggaatggaaccccagagttcaggggccgcctggccccacttgcttcttcccgtttcctccatgaccaccaggctgagctgcacatccgggacgtgcgaggccatgacgccagcatctacgtgtgcagagtggaggtgctgggccttggtgtcgggacagggaatgggactcggctggtggtggagaaagaacatcctcagctaggggctggtacagtcctcctccttcgggctggattctatgctgtcagctttctctctgtggccgtgggcagcaccgtctattaccagggcaaatgtctgacctggaaaggtccaagaaggcagctgccggctgtggtcccagcgcccctcccaccaccatgtgggagctcagcacatctgcttcccccagtcccaggaggctgagcctgattgtcctgagaaatgggaaggatcagatatgactcctccttggcaactgccctttcctgccaggcccacacataccctcttctggctgttaggggagcttgggtccctgaacactgtcattcacccaataaattactatttgaccccagagtgggtggaagggtgagccatgtgtttt

SEQ ID NO: 244 - DNA, 7470 bp, Homo sapiens
gacagacgaggtttgcgcttggctgggcatgttccgcggctactctgcggcgcgccaggcccccgctttccgcaccccgcgaccctagaagccaccgaaccgccggcgggccatggccactctgccgagcgcagagcgccgcgcgttcgcgctcaagatcaacaggtattcttcagcggaaataaggaaacagtttactctcccaccaaaccttggccagtaccatcgacagagcataagtacctctggcttcccctctcttcaactacctcagttttatgaccctgtggagccagtggactttgaaggacttctgatgacacacctgaacagcctggatgtgcagcttgcccaggagctcggggacttcactgatgacgacttggacgtggtgttcacgccaaaggaatgtaggactttgcagccctctttgccggaggaaggggttgaactggaccctcatgtcagggactgtgttcagacctacatccgtgagtggctaatcgtgaaccggaaaaaccaaggaagtccagaaatctgtggctttaaaaagactggatctcgaaaagattttcacaagacgcttccgaaacagacgtttgagtcggaaaccttggagtgcagtgaacccgctgctcaggcaggcccccgccacttaaacgtgctgtgcgacgtgtctgggaaaggccccgtcactgcctgtgactttgacctccgcagcctgcagcctgacaagcggctagaaaacctcctgcagcaagtgagtgccgaggactttgagaagcagaacgaggaggcccggaggaccaataggcaggccgagctctttgccctttacccatcagtggacgaggaggatgctgtggaaatacgtccagtaccagaatgtcccaaggaacacctgggcaacagaatattggtcaagttgctgaccttgaagttcgagattgaaattgagcccctgtttgccagcattgccctctacgatgttaaagaaaggaaaaagatctcagaaaattttcactgtgacctgaactctgaccagttcaaaggatttctgcgagctcacacgccttcagtggccgcatcaagtcaggcgagatctgcagtcttctcagtcacctacccgtcctcagacatctacctggtagtcaagattgaaaaagtcctgcagcagggagagattggagactgtgcagagccctacacggttatcaaagaaagtgatggtggaaagagtaaagaaaagattgaaaaactaaaactccaagctgaatccttctgccagcgtttggggaaataccggatgccctttgcctgggcacccataagcttatcaagcttcttcaatgtctccacccttgagagggaggtaactgatgtggactctgtggttgggagaagctcagtgggtgaacggaggacattggcccaatctagaaggctttctgaaagagccctctccttggaggaaaatggggttggatccaacttcaaaacctccactctgagcgttagcagctttttcaagcaggaaggagatcgccttagcgatgaagacttattcaagtttttagctgactacaaaagatcatcatccttacagagacgagtcaagtcaattccaggcttgctaagactggagatttctacagctccagagatcatcaattgctgtctgactcctgaaatgctgcccgtgaaaccctttcctgaaaaccggacacgcccgcacaaagagattttggaatttccaacacgagaagtatatgtccctcacactgtgtacagaaaccttctctatgtctacccacagaggctgaactttgtaaacaaactagcatcagcccggaacattacaataaagatccagtttatgtgtggagaagatgctagcaatgcgatgccggtcatctttggaaaatccagcgggcctgaatttctgcaggaagtgtacacagctgttacataccataataagtctcctgacttttatgaagaagtgaaaattaagctccccgctaagctcacagtaaatcaccacctcctgttcaccttctaccatatcagctgtcagcagaagcaaggagcctccgtggaaactctcctgggatattcatggctgccaattctcttaaatgaacgtcttcaaactggatcctactgtctcccagttgccttggaaaaattgccacccaactactccatgcattctgctgagaaagtcccattacagaatcctcccattaagtgggctgaaggacataagggagtatttaatattgaagtgcaagctgtttcttctgtacacacccaggacaaccacctggagaagttcttcaccctctgccactccctggagagccaggtgaccttccccatccgcgtgctggatcagaaaatcagcgagatggcgctggagcatgagctgaagctcagcatcatctgcctgaactcctcccgcctggagccgctcgtgctcttcctgcacctggtgctggacaagctcttccagctgtccgtgcagcccatggtcatcgctggccagacagccaacttctcccagtttgccttcgagtccgtggtggccatcgccaacagtctgcacaacagcaaggacctgagcaaggaccagcatgggaggaactgcctgctggcttcctacgtgcactacgtcttccgcctgccagaggtgcaaagggatgtgcccaagtcaggcgctcccactgccctcctagaccctcggagctaccacacgtatggccgcacatcagctgctgctgtgagttcaaagctgctgcaggcccgggtgatgagcagcagtaacccagacctcgcggggacacactccgcagcagacgaggaagtgaagaacatcatgtcttcaaagatcgccgatcgcaactgcagccgaatgtcttactattgctctggcagtagtgatgctccaagttcacctgcagccccaaggccagccagcaaaaagcatttccatgaggagcttgcccttcagatggtggtcagcaccggaatggtgagagaaacagtcttcaagtatgcctggttcttctttgagcttctggtgaaaagcatggcccagcacgtacataacatggacaaacgggacagttttcggaggactcgtttttctgaccgtttcatggatgacataactactattgttaatgtggtcacctcggaaattgcagcccttttagtaaaaccacagaaggaaaatgaacaggcggaaaagatgaacatcagcctggctttcttcttgtatgaccttctctccctcatggatcggggctttgtgtttaacctcatcagacattattgcagccagctgtcagccaagctcagtaaccttccaacgctcatttccatgaggctagagttcctgagaatcctctgtagccatgagcattacctcaatctgaaccttttttttatgaatgctgatactgctccaacatctccttgtccttccatatcttcccagaactcaagctcctgctccagcttccaggaccagaagatcgccagcatgttcgatctgacttccgagtaccgccagcagcacttcctcaccgggctcctcttcacagaactggctgctgccctggatgccgaaggggaaggaatcagcaaagtacaaaggaaagctgtcagtgcaattcacagcctgctaagttctcacgacctggacccacgctgtgtcaaaccagaggtgaaggtcaaaatcgccgccctttacctacctttagttggcatcattttggatgctttgccacagctctgtgactttacagttgcagatactcgcagataccgcaccagtggctcggatgaagaacaagaaggagccggtgccattaaccagaatgtggctctggccatagcagggaataatttcaatttgaaaacaagtggaatagtgctgtcttccttgccctataagcagtacaacatgctgaacgcggacactactcgcaacctcatgatctgcttcctctggatcatgaaaaatgctgatcagagcctcattaggaagtggattgctgacctgccatcaacgcagctcaacaggattttagatctacttttcatctgtgtgttatgttttgagtataagggaaaacagagttctgacaaagtcagtacccaagtcctgcagaagtcaagggatgtcaaggcccggctggaagaggctttgctccgtggggaaggggccagaggggagatgatgcgccgccgggctccagggaacgaccgatttccaggcctaaatgaaaatttgagatggaagaaagagcagacacattggcggcaagctaatgagaagctagataaaacaaaggccgagttagatcaagaagccttgatcagtggcaatctggctacagaagcacatttaatcatcctggatatgcaggaaaacattatccaggcgagctcggctctggactgtaaagacagcctgctgggaggtgttctgagggtgctggtgaattctctgaactgtgatcagagtaccacctacctgactcactgctttgcaacactccgtgctctcatcgccaagtttggagacttactctttgaagaggaggtggaacagtgtttcgacctatgtcaccaagtcctgcaccactgcagcagcagcatggatgtcacccggagccaagcctgtgccaccctttacctcctcatgaggttcagttttggagccaccagtaattttgcaagagtaaagatgcaagtaaccatgtccctggcatctttggtgggaagagcaccagactttaatgaagagcacctgagaagatccttgaggacaattttggcctattcagaagaggacacagccatgcagatgactccttttcccacccaggtggaggaacttctctgtaatctgaatagcatcttatatgacacagtgaaaatgagggaatttcaggaagatcctgagatgcttatggatctcatgtacagaattgccaagagttaccaggcatctcctgatctgcggctgacctggctccagaacatggcagagaaacacaccaagaagaagtgctacacggaggctgccatgtgcctggtgcacgccgctgcgttagtggctgagtatctgagcatgctggaggaccacagctacctgcccgtgggcagtgtcagcttccagaatatttcttccaatgtgctggaggagtctgtggtctctgaggacaccctgtcacctgacgaggatggggtgtgcgcaggccagtacttcaccgagagtggcctggtaggcctcctggagcaggccgcggagctcttcagcacgggaggcttatatgagacagttaatgaggtctacaagctggtcatccccatcctagaagcgcatcgagaattccggaagctgacactcactcacagcaagctgcagagagccttcgacagcatcgttaacaaggatcataagagaatgtttggaacctacttccgagttggtttctttggatccaaatttggggatttggatgaacaggagtttgtctacaaagagcctgcaattaccaagcttcctgagatctcacatagactagaggcattttatggtcaatgttttggtgcagaatttgtggaagtgattaaagactccactcctgtggacaaaaccaagttggatcctaacaaggcctacatacagatcacttttgtggagccctactttgatgagtatgagatgaaagacagggtcacatactttgagaagaatttcaacctccggaggttcatgtacaccaccccgttcaccctggaggggcggcctcggggagagctgcatgagcagtacagaaggaacacagtcctgaccactatgcacgccttcccctacatcaagaccaggatcagcgtcatccagaaggaggagtttgttttgacaccgattgaagttgccattgaagacatgaagaagaagaccctgcagttagcagttgccattaaccaggagccgcctgatgcaaagatgcttcagatggtgctgcaaggctctgtgggagctactgtaaatcagggaccactggaagtagcccaagtgtttttggctgaaattcctgctgatccaaaactctatcgacatcacaacaagttgaggttatgctttaaggaattcatcatgagatgtggtgaagctgtagagaaaaacaagcgtctcatcacggcagaccagagggaatatcagcaggaactcaaaaagaactataacaagctaaaagagaacctcaggccaatgatcgagcggaaaattccagaactgtacaagccaatattcagagttgagagtcaaaagagggactccttccacagatctagtttcaggaaatgtgaaacccagttgtcacagggcagctaagaaaagccatcttcattcgtggagactgtggccctgcaaccctggagaaggacttgctggtacttaaaaaatgggacatttgccacccaggactgactgtacactccctgatcagccagcactctggaagctttgggatcccaggaaccatggaattattcccaaatggactctgaccagatttttgccatactggggggtggcgggatggaggatgggtactcaggcatgactgcgtatttattaaagtgtgtttttccacaatgtaccaaacaaggcataagcagcttctcctgctgactggccaatcactgcccatctgagagatgatttcctctggcccatatttgaatttattggagtaactcaaattgcctgaggaaaaatggaaaaattatccaccagtcgattcaaactgaatttcactctttataggaaggcagggcaaacttgtaggagtacgaaacattttcaataaatctacaaagggaagccttactacaattccaaaaatcatcatggttggaaatttgggaggagattatttgtgaacttgttacccttttggtaatggtggactaattgctgtatagttatttttgttttattattactgttacattaatttaacatgcatttatagaagaatacattcaaagcactgatgtaggagatacacggtacttggagcagtcagccagaaatcacagatactgctttcacttaaatggaaacaattctccgataatgctttgctttttttcttatgtcactcttgtgtactatctatttttctcctctctgggaccaagtttctttttataaagcaataatatctctgttttcatttcagaacattgtgctgtctgtcagcatatgtatatcagctacaaaatatattcaactttgacttcttttgacaaaggactttaggaaaaagaggaacaaagacattatttgagaattaaattatatatttttaatatgactgtgaccttgactgataataaagatgtaataagaattgcaagctaaatgttaaaaaaaaaaaaaaaaaa

SEQ ID NO: 245 - DNA, 2454 bp, Homo sapiens
acgacccggagcgaaggtctcgcgaggcctgggcgctgcggcggcaggaggaggacggggaaggacggagccgagccgcggctgcctccctcgctcactccctcgcgcactcgcccgccccctccctccctcccctcccttccccggccccggctctggccccggcccattcgctgttgggtcttctgctagggaggatgtcgggttcgtcgctgcccagcgccctggccctctcgctgttgctggtctctggctccctcctcccagggccaggcgccgctcagaacgctgggtttgtcaagtcgcccatgtcagaaactaagctcacgggggacgcctttgagctgtactgtgacgtggtcgggagccccacgccagagatccagtggtggtacgcagaagtcaaccgggcagagtctttcagacagctgtgggacggtgctcggaagcgccgtgtcaccgtaaacaccgcctacgggtcaaacggcgtgagtgtgctgagaataacccggctcaccttggaggactctgggacttacgagtgcagggccagcaacgaccccaagaggaatgacttgaggcaaaacccctccataacatggattcgagcccaggccaccataagcgtccttcagaagccaaggattgtcaccagtgaagaggtcattattcgagacagccctgttctccctgtcaccctgcagtgtaacctcacctccagctctcacacccttacatacagctactggacaaagaatggggtggaactgagtgccactcgtaagaatgccagcaacatggagtacaggatcaataagccgagagctgaggattcaggcgaataccactgcgtatatcactttgtcagcgctcctaaagcaaacgccaccattgaagtgaaagccgctcctgacatcactggccataaacggagtgagaacaagaatgaagggcaggatgccactatgtattgcaagtcagttggctacccccacccagactggatatggcgcaagaaggagaacgggatgcccatggacattgtcaatacctctggccgcttcttcatcatcaacaaggaaaattacactgagttgaacattgtgaacctgcagatcacggaagaccctggcgagtatgaatgtaatgccaccaacgccattggctccgcctctgttgtcactgtcctcagggtgcggagccacctggccccactctggcctttcttgggaattctggctgaaattatcatccttgtggtgatcattgttgtgtatgagaagaggaagaggccagatgaggttcctgacgatgatgaaccagctggaccaatgaaaaccaactctaccaacaatcacaaagataaaaacttgcgccagagaaacacaaattaagtactgcttacaatatctttaggttcctgaaactggtggcaacatgacctgctaaaattttctgcttggacctctttggttctctcccctttcaagtgagcaacaccacaatgactgtctaaagcatgccttatttagcctctcctgtaagggtgatctagccaggtacattttaaacaatgcttcagtgtagaaggtgtaaactattttgggcttgatgtgctgtgaatgttgcttttttttttcctttgttaaaatatttaaatagaagtgaaaaggtcctctgaggatcagatcatgcatgcgccattttttacttaatgcagctgttaaattggcaaagctctaaaatgcactgctgccatctagtgatacacttttgtaaagtacagcaaaacctacagatatatacagtatataaatatatatatatatatatttatatttttgggggtgggagaaatccaaaataaagtaaatgcttgtttcatttttaagctgctgatattcattccttattgtatgttgtcagatgaggaaattgtgcagttctggtacataaagatgagtaatataaactgaaatctataattttaagggcttaacctgtgactttaataagctggaacagtccactgaatgggtataatgaattgcagtatatacgtatgattgctttttaagtgattatcttttcttctgttaagtcatgtaaattcataaatccttttgcactgatgtgttgaaccttattcttgtacattcattcaatcaaggcaaacttttataatttttcttttgtttccaatgaccttgaaatgttatagcatggtaatattctatgcaactatagttatactttttggtttgacactgtattttttcacattgatttactggttgatgatagattttataacctaacggttctcatgcggtgcgtaattgtagatgcatgtacttgtgtgttttgtgtaattattgaagtgcaatgatgtataaaaaagtggattcacctgtttttaaaaataaaacattgataaaaggtgtttggataata

SEQ ID NO: 246 - DNA, 4392 bp, Homo sapiens
acagttgccccggtgagggaaacggaggcgccatagccacggtagtcgtggcgaccaagcaacccggcaacgcgagtcaacaacaacaaccgcccggccgacccccacccccaccccccaggcccggcccggggaccccagcacgtcccgtccccttcccaacatcgactccgagacctccgaaaagcgtttccgcagacagaagtggggagaagcggaggaattaaaaaaaaaaaaaagccttatttattatcattttccccaccgttggcatggcaacacaggcgtatactgagctacaggcagccccgccaccatcccagccgccacaggccccgccacaagcccagccccagccgccaccgccaccacccccagcggcaccccagcccccgcagccacccaccgctgctgccacccctcagccccaatatgtcaccgagctgcagagcccccagccccaggcacagccaccgggtggccagaagcagtacgtgacggagctcccggctgtacccgcaccctcgcagccaaccggtgcacccaccccttcgcctgcaccccagcagtacatcgtggtcactgtctctgaaggtgccatgcgggccagcgagacagtgtcggaggccagccccggctccaccgccagccagaccggcgttcctactcaggtggttcagcaggtgcagggcacccagcagcggctgctggtccagacgagcgtgcaggccaagccaggccacgtgtcgcccctccagctgaccaacatccaagtgccccagcaggctcttcccacgcagcgtctggtggtgcagagcgcagccccaggcagcaaaggtggccaggtctccctgacggtccatggtacccagcaggtgcactcgcccccagagcagtcgccggtgcaggccaacagctcttccagcaagacagccggggcccccacgggcacagtgccacagcagctgcaggtccacggcgtccagcagagtgtccccgtcacccaagagagatctgtggtccaggccactccacaagcgcccaaacccggcccggtgcagccgctgaccgtgcagggcctccagccagtccacgtggctcaagaggtgcagcagctccagcaggtgcccgtcccacacgtgtactccagccaggtgcagtatgtggagggcggcgatgccagctacacggccagtgccatccgttccagcacctactcctatcccgagacgccgctgtacacgcagacggcaagcaccagctactacgaggccgcaggcacggccacccaggtcagcacccccgccacctcccaggcggtggccagcagtggctccatgcccatgtacgtgtccggcagccaggtcgtcgccagctccaccagcactggggctggggccagcaacagcagcggaggtggtggcagtggtggtggcggcggcggcgggggaggcggtggcgggggtggcagtggcagcaccggaggcggcggcagcggagcaggcacctacgtgatccaaggcggctacatgctgggcagtgccagccagtcttactctcacaccacccgtgcctcgccagccacggtccagtggctcctggacaactatgagacggctgagggcgtgagtctgccacggagcaccctctactgccactacttactgcactgccaggagcagaagctggagcccgtcaacgccgcctccttcggcaagctcatccgctccgtcttcatgggcctgcgaacccgccgtctgggcaccaggggcaactccaagtaccactactatggcctgcgcatcaaggccagctcacccctgctgcggctgatggaggaccagcagcacatggccatgcggggccagcccttctcgcagaagcagaggctcaagcccatccagaagatggaaggcatgaccaacggcgtggcggtggggcagcagccgagcacggggctgtcggacatcagcgcccaggtgcagcagtaccagcaatttttggatgcctctcggagcctccctgacttcacagagctcgacctccagggcaaggtgctgcctgagggcgtcgggcccggggacatcaaagccttccaggtcctgtaccgggaacactgtgaggccattgtcgacgtcatggtgaacctgcagttcaccctggtggagacgctgtggaagaccttctggaggtacaacctcagccagcccagtgaggcgccaccgctggctgtacatgacgaggccgagaagcgactgcccaaagccatcctggtgctcctctccaagttcgagcccgtgctccaatggaccaagcactgtgacaacgtgctgtaccagggcctggtggaaatcctcattcccgacgtgctgcggcccatccccagtgccttgacccaagcgatccggaactttgccaagagcctggagagctggctcacccacgccatggtcaacatccccgaggagatgctgcgggtgaaggtggccgcggctggcgccttcgcgcagacactgcggcgctacacgtcgctcaaccacctggcgcaggcggcgcgcgctgtgctgcagaacaccgcacagatcaaccagatgctgagcgacctcaaccgcgtggacttcgccaacgtgcaggagcaggcctcgtgggtgtgccgctgcgaggaccgcgtggtgcagcggctggagcaggacttcaaggtgacgctgcagcagcagaactcgctggagcagtgggcggcctggctggacggcgtggtgagccaggtgctcaagccctaccagggcagcgccggcttccccaaggccgccaagctcttcctcctcaagtggtccttctacagctccatggtgatccgggacctgaccctgcgcagcgccgccagcttcggttccttccacctcatccggctgctctacgacgagtacatgtactacctgatcgagcaccgcgtagcccaggccaagggcgagacccccatcgccgtcatgggcgagttcgccaatctggccacctccctgaaccccctggaccccgacaaagacgaggaggaagaagaggaggaggagagcgaggacgagctgccgcaggacatctcactggcggctggcggcgagtcacccgcgctgggcccggagaccctggagccgccggccaagctggcgcggactgacgcgcgcggcctcttcgtgcaggcgctgccctccagctaagcccttggcctccccgccccacccgcccccgccacccctccacgccagggtccctcaaagcttctgtggcttcgtggtcactgctccagcctcagccagggcagggagggggactccgagacagggaagaccggggccctcctcccttatggggccggcacaatcagtgggctgggcggagccgcagctgcaaactctgacacaaaagacgtgccttaaggaacccgccgcgtgcccaggtgccccgcggggcatccagctcggccccttggccgcccccctcccaggccccagcgtcttctccccagccccgtcctcccaccaccccagggggcaggcaggcaggccccctcccgtgcgaaactgttaacttattcagctcgctggctttgcacagcctgtcctgggcccagccctgagccccgggccggcgcaggtgggcgtcacctggggactccccactgtcagcagcagccccgggacaccctacccccagcaaccccactgcttccccttcttggtattaagtgcaattaaagccgtgggtgtcgcatcttctccagcgctgggccctcccttgcccccaagctcaagaagggggcactgcccggcccggctgtgaggagggcggcagggggcacggcctccagcttccaaagagcagcgagccgcggagccggggagtgcccacagaccccagcccccgcgcccccgccctccgccgctggtttgtaatggaaccttttctgtgcccctatcttcccggagaccacgcttctcctccgtgccgtgcgacccccaccccatgactattgtgcgattcgtgagcgccgcccgagcggagttggtaacttgttgggtttttttccaaccatcatggccttatctgttccagttttctcagtgttttcagcctgtgagatagatgtttatggcaagaaaaaggaaaaaaaaatggaaatctgacctattgtataaaaatcactattttgtgtgctccgcgtgctatagcttttggggcggccctgcccagtccccgtgcccacggggctccctctcccggtggtgaaagtgtccacacgtgtggtagtctagtgtgccgagctgttttctacctttttgtagtctttcttaaaacaataaattccgctgtgatatttgcctaaaaaaaaaaaaaaaa
